(19) United States
(12) Patent Application Publication
(10) Pub. No.: US 2021/0285063 A1
(43) Pub. Date: Sep. 16, 2021

(54) GENOME-WIDE MAIZE SNP ARRAY AND USE THEREOF

(71) Applicant: Beijing Academy of Agriculture and Forestry Sciences, Beijing (CN)

(72) Inventors: Fengge Wang, Beijing (CN); Hongli Tian, Beijing (CN); Jiuran Zhao, Beijing (CN); Yang Yang, Beijing (CN); Hongmei Yi, Beijing (CN); Liwen Xu, Beijing (CN); Rui Wang, Beijing (CN); Lu Wang, Beijing (CN); Jianrong Ge, Beijing (CN); Yaming Fan, Beijing (CN)

(73) Assignee: Beijing Academy of Agriculture and Forestry Sciences, Beijing (CN)

(21) Appl. No.: 17/105,847

(22) Filed: Nov. 27, 2020

(30) Foreign Application Priority Data
Nov. 28, 2019 (CN) 201911186629.9

(51) Int. Cl. C12Q 1/6895

(52) U.S. Cl. CPC C12Q 1/6895; C12Q 2600/156

(57) ABSTRACT

The present disclosure provides a genome-wide maize SNP array and use thereof. In the present disclosure, by means of large-scale sequencing mining, aiming at the problems of the existing high-density arrays of maize, 400 broadly representative maize inbred lines inside and outside of China are deeply sequenced to mine excellent loci therefrom, and research results of six maize arrays are integrated; by adopting the steps of biological information data analysis, locus basic parameter evaluation, probe design evaluation, a set of SNP locus combination, containing 1,536 loci, is formed, and genotyping is realized on an Affymetrix axiom platform. The genome-wide maize SNP array of the present disclosure contains probes for the 1,536 SNP loci. The array of the present disclosure can be used in DNA fingerprint construction, cultivar identification and confirmation of maize cultivars, research on germplasm resources at a genomic level, and molecular marker-assisted selective breeding.

### TECHNICAL FIELD

[0001] The present disclosure relates to the technical field of crop breeding and molecular biology, and in particular to a genome-wide maize single nucleotide polymorphism (SNP) array and use thereof.

### INCORPORATION-BY-REFERENCE OF MATERIAL SUBMITTED ELECTRONICALLY

[0002] Incorporated by reference in its entirety herein is a computer-readable nucleotide/amino acid sequence listing submitted concurrently herewith and identified as follows: One-506,952 Byte ASCII (Text) file named “WANG_GWP202010421_BAAFS-P0001_17105847 PATENT-APPLICATION_REVISED-SEQUENCE-LISTING.TXT”, created on Apr. 23, 2021.

### BACKGROUND

[0003] With the rapid development of genomics and biotechnology platforms, crop genotyping has entered a new era. Various crops have successively undergone large sample resequencing to establish a genome-wide genetic information database thereof. Based on the establishment of the genome-wide genetic information database, the development of excellent molecular markers, haplotype mapping, and assessment of genome diversity have begun systematically. Molecular markers refer to DNA sequences that are heritable and detectable, are genetic markers based on nucleotide sequence variation between individuals, and are a direct reflection of genetic polymorphism at the DNA level. At the same time, high-density array technology typing platforms have been released one after another, and these platforms have been used in molecular identification, molecular breeding and basic research. SNP markers are characteristic of high distribution density and uniform distribution on the genome, and are the most suitable markers for developing arrays. Maize, as a diploid hybrid crop, has a research foundation of high recombination rate, rich genetic diversity, and excellent genomics; the development and evaluation of SNP loci thereof have an excellent research foundation.

[0004] SNP, as the third generation genetic marker, is the most abundantly distributed on the genome, and is valued by many researchers due to dimorphism, low mutation rate of a single SNP locus, and easy realization of automation and scale through array technology. High-density arrays of maize are mainly commercialized arrays, and evaluation materials thereof are basically from a few dozens of samples, which leads to the analysis of wide range materials with low data quality and low polymorphism. In order to accelerate the application of maize genetic research and breeding, it is necessary to select materials worldwide to evaluate SNPs. Use of high-quality sequencing data in combination with the research foundation of existing arrays is urgently needed to develop a genome-wide, high data sharing, and high throughput genome-wide maize SNP array suitable for multi-platform detection.

### SUMMARY

[0005] An objective of the present disclosure is to provide a genome-wide maize SNP array suitable for molecular identification and molecular assisted breeding.

[0006] In the present disclosure, 400 broadly representative inbred lines inside and outside of China are deeply sequenced, and SNP loci are mined at a genome-wide level to establish an excellent collection of SNP loci; based on biological information analysis methods, dimorphic and single-copy SNP loci are determined and high-quality loci in 6 known arrays have been integrated to form a set of candidate loci; locus scoring evaluation and probe design are performed by submitting to Affymetrix and Illumina, two mainstream technology platforms; loci that meet the design requirements are further evaluated based on the sequencing data and further analyzed to obtain a high-quality and efficient locus set based on parameters such as polymorphism, heterozygosity, and conservation of flanking 60 bp sequences; the above-mentioned loci are formed into a set of candidate loci according to the principle of substantially uniform distribution; locus scoring evaluation and probe design are performed again by submitting to Affymetrix and Illumina again to form a high-density 60K array (Maize6H-60K); based on the 60K array, using 200 inbred lines and 200 hybrids, loci are verified according to the test results such as data acquisition rate, genotyping effect, and characteristics of triplet, and marker loci with 9K compatible multi-platform, high test data quality and high polymorphism are selected from the 60K arrays; still further, in accordance with a uniform distribution, 2-4 markers are screened each 2,000 Kbp, and finally, 1,536 SNP markers are determined from 8K. The specific information of 1,536 SNP markers is shown in Table 1.

TABLE 1

| Lo- | Chro- | | |
|---|---|---|---|
| cus | mo- | Ph]sical | |
| No. | some | location | Flanking sequence |
| MI00 | 1 | 379843 | CAGCCATAAAACGAGATGCTCGACATCCTGATGCT[C/T]GAATGGTGATTATTAAAAAA |
| 01 | | | CAAGGAAATCAAAGA |
| MI00 | 1 | 1747250 | ACATTCCGATCGACGCTGAGAAGTTGCAACCCCAG[A/C]AAGGGTCCTCGACCCATGT |
| 02 | | | CTCGCAGGTACAACCA |
| MI00 | 1 | 2873870 | CGAACGGTTGGACACACTGTGCTGAAATGGCGTGA[C/T]GGATACAGTGACACATTAC |
| 03 | | | TTGCACATACATACTG |
| MI00 | 1 | 7042592 | CCGATACAAAGACGAATAGGTACAGTAATCACCTC[C/T]TCTTTTCCTCTCTTGAGACG |
| 04 | | | TGGCATATATTTTTT |
| MI00 | 1 | 7186768 | ACATTTCCAGCAGTGGCGGCCAAGGCTCGGATGTT[C/T]TCCTGTGTGTCAAAAAAAC |
| 05 | | | CCATTTCTTGGAGCTG |
| MI00 | 1 | 7566162 | CGAAATTGTTTGTGAATCTAGTCTGTTTACTTCCA[G/T]GCTTACGTGCGGATGTGGCC |
| 06 | | | AGGAGCGTTGGCCAG |
| MI00 | 1 | 7819799 | CAAAACGGGGTGGGGTTTTCATTTTATTACACGAC[A/G]AACAGAATCAGCAAACGAC |
| 07 | | | GGAATGGACTCGTAGG |
| MI00 | 1 | 8974336 | CTTGCCTGGTACAGGAACTGTGCGTAGTTCCTGAG[A/G]AAGAGGCCGTTGCAGGGG |
| 08 | | | TCCTCCTCGATCATCTT |
| MI00 | 1 | 10435348 | GGAGACTTCGATCATGGCTTAAGATGAACCATGGC[A/G]ACATGCTTAACACATGCAA |
| 09 | | | GTCAAACGAAAAGTAG |
| MI00 | 1 | 12241206 | TGAGACCCTGGGAGTAGTCTAGGAGAGAGAAGGTC[A/G]TCATCTGCATGCATGGCA |
| 10 | | | GTATGGCACGCAGTGTG |
| MI00 | 1 | 13832598 | TATATTTAGTCAGTCAGCAGATTAGGAATAAAAGA[A/G]ACAACAGATAAGTTTTTATA |
| 11 | | | TTTAGTCAGTCTGTT |
| MI00 | 1 | 15067243 | CGACTAAAAAACAACACATGGCAGAGGCAGACCAC[A/C]ATTTGAACTTCCCTCCAA |
| 12 | | | AAGTCCAGACTCCCAAG |
| MI00 | 1 | 15271845 | TTGCGTTGTTGCTCATGTATCGCCTCAAGAGGGGA[A/C]GCTTAAAGATGGGTGGAAG |
| 13 | | | CCGATACACCGTATTC |
| MI00 | 1 | 16059383 | CTCAGCCCCTCCACTCGCATCCCGTGTCCATCGGC[A/C]GGAGATCAAACTCCACACG |
| 14 | | | GCGCTCTGCTTCCATT |
| MI00 | 1 | 16125470 | TGGAGAGAATCCATGTACCTGAAAAGCTGCCGAAA[A/G]TATAGCAAGAGCAGGGCA |
| 15 | | | AAATGTTGAAAATTTTT |
| MI00 | 1 | 16585784 | AGCCATGCATGATTGGTACTCGCTCCATTGAGCTC[A/G]ACAAAATCATCGAAGATTAG |
| 16 | | | CATCTCCTTGAACCA |
| MI00 | 1 | 19592715 | AGTTTAATTAAGGAATCAAAAGCATAAATCACACA[C/T]ATAAAGAATTGAAATTTAAA |
| 17 | | | ATGGACGCTTATTAA |
| MI00 | 1 | 19943737 | AGACTGCTTTCTTTCAATGGCTCCTGACTGCCTTC[G/T]TTCGATGCCTCCTGACTGCC |
| 18 | | | TTCTTTCGATGCTGG |
| MI00 | 1 | 20644157 | TCACCTGCTATGTTTTTCTAGGTTGTGCCATTAGA[C/T]CAGGCACACAAAATATACAA |
| 19 | | | CGCCTTGAAAGAGAA |
| MI00 | 1 | 22614426 | AGTTAAACGGTTTATGAAAATAAGTTGACGGCCAA[A/G]ACATGCAGCCAATTTAAAA |
| 20 | | | ATAAATGTAGGCACCA |
| MI00 | 1 | 23193957 | GCAGAAAGAAAAATCGGAAAGAAAGCCGGCCCCGG[C/G]CGGATGCGGTTTCTCGA |
| 21 | | | GAATCTTCTGGCAACGAC |
| MI00 | 1 | 24044764 | ACCTGTAGTGTTAGCATGAGTCATGATACCATGTT[A/G]GACATTTGAAGGAAAGTTCT |
| 22 | | | AATAGATAAGTTCGC |
| MI00 | 1 | 24053957 | GACCAGTGATCAACTGCATCGCGACGGCCCATGCG[C/T]GTCATCAAGATGCGGCCCA |
| 23 | | | CACGCACGCGTACCTA |
| MI00 | 1 | 24209878 | TCTTCCCAAGGGGATGGGAATGAGGAGTCATTCAC[C/T]GAATAAGAATTCTCCGCTG |
| 24 | | | CCATCTCCAGTGGGGA |
| MI00 | 1 | 24411696 | GGGAGCAGATCCCACCTTTCATTAAAATACCATCA[C/G]GGCATCTGAGTCAGATGCCT |
| 25 | | | GACGATGGACAAAAG |
| MI00 | 1 | 24938795 | TAACAGAAACCGAACAAAAAAGGGGGAATCCTAAC[G/T]AACTGCGCCCTGATCGGG |
| 26 | | | GGCGCAATCCTATATGG |
| MI00 | 1 | 25641942 | TAATAATACAATAAGTGTGTGCACACGAATAAATG[C/T]CATCATTGTCAAGTGTTAATT |
| 27 | | | TGAATGACAAAGAT |
| MI00 | 1 | 26916675 | AATTAATGGCGCAAGGTTCCTGCTTGTGCAATTTG[A/C]TCATTTCATGAGGGCATGAG |
| 28 | | | TAGTCATCACCATGC |
| MI00 | 1 | 27628871 | CGTGGTCACTGGCCACTGCACATTGCCCAGGATTT[C/T]CTGTGGATGGCCGGGCCCG |
| 29 | | | GGACAGCAGCATGGTG |
| MI00 | 1 | 28388021 | GTTCGTCTCTACGTGACTCTCTCTCCATATATATA[G/T]TCTCTTAATTACACTTATGGT |
| 30 | | | TTAGAGGCTCTAGG |
| MI00 | 1 | 28864842 | AGGGAGTAATCCAATGCTACTGGTGTTTGTGCACC[A/G]ACATGTGAACCTTTTTGTGT |
| 31 | | | CTAACTGATGCTGCC |
| MI00 | 1 | 30282315 | CCTTTCATCACGCTGGCGGGTCCGGGATTGCTGTT[C/T]GGAGTACGCGCTCCTTTCA |
| 32 | | | AAATGTTTGGTGAATT |
| MI00 | 1 | 30542690 | CCTTCTGAGCTCTGTGGTGCTCTTATAGGTTTTTT[C/G]AGAGGTAGCTGTGGGGTCCT |
| 33 | | | TTAATTTAGGTCCTA |
| MI00 | 1 | 31214698 | TCACGCGGTGTCCGATTGATACCATCGTCGTTGCT[A/G]CAGGTACGGCTCGTGATAG |
| 34 | | | ACCCGGTTATAACGAA |
| MI00 | 1 | 31654357 | GTATATACACATCGGCACTTCCTAATCTTCGCTTC[A/G]GAATGCCAATTTGGCTCCTTT |
| 35 | | | TTCCCTTAATCATA |
| MI00 | 1 | 33003573 | AGCAGAGGATTATAGCTTTCATTGGAAGGTATGCA[A/G]TGGTGGCATAACTTTTATGG |
| 36 | | | CGATCATTAATTCTG |
| MI00 | 1 | 33835829 | TCGCCATGGCCGGAAATTGTTTCCGGGGGGTTTCT[A/G]CCTTTCTGGCTTGGATAGA |
| 37 | | | GGAAAGAGATAGAGCG |
| MI00 | 1 | 35804891 | AGGACTAAATGTGATGCTATCACACCACAAAAGAA[C/T]GTGGCACCGAGCATTACGA |
| 38 | | | TCCTGAGGTCGGGACT |
| MI00 | 1 | 35995804 | AAATCATTCTAGGTGAGGTATGGCTTCAAATTCCC[C/T]GTCCTCCTCTTATTTAAAAA |
| 39 | | | AAAGGACATGTAATT |
| MI00 | 1 | 37159651 | TGCCTGAAGACACATATCAGGTGGCGTGTTCTCTA[A/G]GGCAGAAGACTACCGACCT |
| 40 | | | AGCCGAACTAAAGGAA |
| MI00 | 1 | 38255163 | CATACTGGACCTTCGATTTACCAATCTGTCCATTA[C/T]GATCAGCGATTAAACCGTAA |
| 41 | | | GGTTTAGGAAATTTC |
| MI00 | 1 | 39750051 | TTTTGTTCCTGTACATGTGAAGGTCAATTGGTCTG[A/G]GGTTTTTAAAATACAGTAAT |
| 42 | | | TGGTTTACGGGTTTT |
| MI00 | 1 | 40231408 | TTTTAACTGCATTGCGGAGTCAGTCAGGTGGGCTG[G/T]CATCTGCGCAAAAGGTGAA |
| 43 | | | ACCATAGGCCCGGTGC |
| MI00 | 1 | 40905538 | TATTGTGGTAATTAAGAAAAAAACAGGGCTGCGTC[C/T]AAGCAGTTGTACATAGAAG |
| 44 | | | ATTAATATCCGATGAT |
| MI00 | 1 | 41088075 | CCGGGTGTGACATCTAGGGCCTTTGACACCACACA[C/T]TCAATAAGGTTATTCGTAA |
| 45 | | | AAGTTAATTACTTATG |
| MI00 | 1 | 41473420 | GGCCCTACCTGCCAGCCACACCCGATCGTCCTCCT[G/T]GCGTACCTAACGCATGCCT |
| 46 | | | AATCGCGGGAGTAAAC |
| MI00 | 1 | 43979495 | CTGGCAATGTGTTCTCATACGTAATCTGGAAGTAC[A/G]GTGTCTTGGTATTTCCGTCT |
| 47 | | | GCTTCCGAGCCAACG |
| MI00 | 1 | 47295429 | TTGGGTGTACATGTGTACACCCATGCCCCTTTACT[G/T]GTTCCGCCCCCGTAAAGACT |
| 48 | | | AAGCTGAAACCATGG |
| MI00 | 1 | 47508846 | CCGCCTCTCCGCGTCCGCTGAGTCACTGCCTCCTG[A/G]GCCCGGACCCACACGCCCC |
| 49 | | | TCGTCAATCAACATCA |
| MI00 | 1 | 47516308 | TTACAGAACTTATGCTCTCCTTCTCAGAGCTTGTG[C/T]AAAATGCTCAGACCTCTATG |
| 50 | | | CTTCCATTGAATCCA |
| MI00 | 1 | 48685205 | CATGTGACCATAGTTCTAAGTTGTACCTACGCCCA[A/G]GTGAATATGGCACAGGATTC |
| 51 | | | AAGATCTGCCCTTGT |
| MI00 | 1 | 48874576 | AACATGATGATGGGGAAATTATCTGTGACATACCC[C/T]TATAAACTTTTAACATGATGG |
| 52 | | | GCAAATTATCTGTG |
| MI00 | 1 | 49374234 | TTTCTCTTGGCATCCATCCTTCTATTTTTCTCCTC[A/G]ATTCTAATTCCACTGTCCTTT |
| 53 | | | TTGAGCCTCTCGCT |
| MI00 | 1 | 50777654 | CCCGAGAGGGACTCCATTGGGAGCAAGGATCTTGG[A/G]GTTGCTTCGGGATCAGCA |
| 54 | | | GGCCAACCAAAATACTT |
| MI00 | 1 | 51296270 | ATATATATAAATGACTAATCGATCTTCCTTAAAAG[A/G]CACACGCATGGTTTTAAATGA |
| 55 | | | TGACAGGCTAGCTT |
| MI00 | 1 | 51789297 | AGGGATAACGAAAACCTTGAGATGACGGCGGGGCA[A/G]TTGTACCACTTCCCTGGA |
| 56 | | | CGACTTCCCCTAGAGGG |
| MI00 | 1 | 52862609 | CTCCTTTTCAATACACCTTTCTTTTTTCAGTACAT[C/T]TATATCTCTACTCTTTGAGAA |
| 57 | | | GTATTTAGGTCGTT |
| MI00 | 1 | 55757457 | GGATTTCATGTGAGTACTTGCAACAGTTATGGCAT[C/T]GTGAGAATCCATGATATGCC |
| 58 | | | ACTGAATAACTACAC |
| MI00 | 1 | 56074772 | GAAGAAGGAAGACTCGCAAACCCGACGCAGCGCAT[A/G]GGCGCGCAGGCGCACCT |
| 59 | | | GCCTCAAAAGCACCGACG |
| MI00 | 1 | 58651548 | TCTCGCTATCAAGATCTAGCATTTGCTGAAAGATG[C/T]ATGGATGTGCAGATTGGTAA |
| 60 | | | ACATTGTATAATGGA |
| MI00 | 1 | 59510464 | CGCAAGGGTGAAATTGAGTTCTACAAGTTACCCCG[A/G]GGTAGAGGTAGAGGAAGA |
| 61 | | | GGAAGTGGAAAATCGAA |
| MI00 | 1 | 61452535 | CCACGGTAGTGTCAATTTGAGAACAAAAATTTCAA[A/C]GGGTGTTCAAAGAATGAA |
| 62 | | | GATTTGAAGTTCAGATG |
| MI00 | 1 | 61478195 | GTCGCTCCTGGACGGTGTAGCCCTTCTGACGTCGT[C/T]CGTAGGGTCATGTGTAGCC |
| 63 | | | ATACTCCTGGCATGGC |
| MI00 | 1 | 62702677 | GCGTAGGGACGACACTACATGATTGTGGATCTACT[G/T]AATGAAGAAAAAAAATTAC |
| 64 | | | TGCATCGGTGCTGTAA |
| MI00 | 1 | 63036079 | TAACACGGTTTGATAGGATTTTAAGATTTTTGTTG[G/T]AAAACCGCTCGTGCTGAAAA |
| 65 | | | ATGGCTGAATTCTTA |
| MI00 | 1 | 63360371 | TTGAGTTCTTTGGCAGGCCACATTAACCTAGTGCA[A/G]TTTTATGATGCTTTTGAGGA |
| 66 | | | TGAAGAAAATGTATA |
| MI00 | 1 | 68935556 | ACTGCTTCTCAAGTCACTATAAGATATACATGAAG[A/G]AATAAAACAAGACAAAAAA |
| 67 | | | CAAGCTTCATCACACC |
| MI00 | 1 | 69652284 | AGAAGGCGCCAAGGCCACTGCTAGAGCCGTCATGG[C/T]AGGACAACATTTTTGCGT |
| 68 | | | TGTATAACCCGCAAGGT |
| MI00 | 1 | 72711033 | ACCGACTCTTCACCAGTTTCCTTGTTTCAGAGAAA[A/G]ACAGTTCCTTCCTCAACCA |
| 69 | | | CTTTCAGTCTTACCAG |
| MI00 | 1 | 75397953 | GGGTAGAAAATCGAGTGTAATTAAGATAACGACTT[C/G]TTGGTCCTGTAATTACCCCG |
| 70 | | | TTTGTACAGTACAAC |
| MI00 | 1 | 77043432 | CGCGTATCTTTTCTTCTTCTGTGACAAATAAAACA[A/G]CACTTTTCCGTATTTGGAAA |
| 71 | | | TCCTGACGTAAGCTG |
| MI00 | 1 | 79334351 | GTCCAACAGAAAGGCACCGGCTAATCCAATCTGAT[A/C]TGACACTAGACAGAGTTCG |
| 72 | | | AACACGGACCATACTA |
| MI00 | 1 | 83653657 | CCCTTTTTTATGTTGCTAGCTGTTGCTTGTGTTCA[A/C]AGTCCAAGATCCAAAGAACG |
| 73 | | | CACATCCTTGCCTCC |
| MI00 | 1 | 83789456 | TAGGAATCCTAATTGCACCGACGGGAAATGAAAAT[A/G]TATTTTAGTAGCGGTTCTTA |
| 74 | | | CCAAAAAATGACACT |
| MI00 | 1 | 84681472 | TTCTCCATGACAACAGCATAAACTTAAAAGGTTTC[A/G]GAACATTGTTAAATCAAAT |
| 75 | | | GAATTCCGCATCTACT |
| MI00 | 1 | 85839980 | GCTGGCCTCATACTTATGCTCGTCGCCAACGCTAC[A/C]AGCTGCAACAAGTTGATATC |
| 76 | | | AAAGAACATAACAGC |
| MI00 | 1 | 86854913 | CTACTTGTGCTTCTGTTTCTAAACTTCTCATGCTC[A/G]GTTTGCATGCAGTGCCATATA |
| 77 | | | GTGCTCCATTTCAC |
| MI00 | 1 | 88529612 | TCTAGCGTAGATAGACCCCCAACAACACCTTTCTA[A/G]AAAATGCTTGATAGGCCCAT |
| 78 | | | CCCACATGTCAAGAA |
| MI00 | 1 | 88974015 | GTTGAGTTTCTGTCGCAGCTGCAAAGATATGCTTG[C/T]GTAAACAATTCTGGTTGATC |
| 79 | | | GGCATACTACAAAGA |
| MI00 | 1 | 91276994 | TATGAAAAGTTAGTACCACTATTTAAATTATACTC[A/C]CTCCCTCCGTTCCAAAAAAA |
| 80 | | | AAAAATATTCGTTTT |
| MI00 | 1 | 91492792 | GCAACGTCAGGGTTGTGGGCTACTGGGTTGCGTTG[C/T]GCCATGCGCGTACGCTCAC |
| 81 | | | ATCCCTCGTCCAGCTA |
| MI00 | 1 | 98173865 | AGGCCGCGCAGAGAGCGACCAGCTCCCTTCCTTCC[A/C]ACTCAGCCCGATCTAATGC |
| 82 | | | CGTGTGTAGCAGTTAC |
| MI00 | 1 | 99988058 | GGATATTCTCTGGGTTAGAAATAGTCCTGGGGTCA[C/G]TACAAACCTTTAGTATGAAT |
| 83 | | | TGATCAAGTTCGTGG |
| MI00 | 1 | 10156805 | TCCTCTAGCGCCACACATGCTGCATGCTCGGATCT[C/T]CCATGCGTAGTAAAATTCTT |
| 84 | | 2 | CACCTCTCGTGTGGG |
| MI00 | 1 | 10294939 | ATGAAGCTGATGCAGAAGATGTTGCCATCTAAGCC[A/G]AAGCGATAGCTGCCAGGGT |
| 85 | | 1 | CACGAAGAGGGCTACA |
| MI00 | 1 | 10551082 | CGCACTCTACTGGTCTTCCCAGCTCCCAGATGCTC[C/T]GCCAGCATAGCCTTCACAGC |
| 86 | | 2 | CACAAAAACGTAGGT |
| MI00 | 1 | 10790560 | AACACATATTTTGTAGGTTCTATGAGCCATCATCA[A/G]AAGAACACAAACCACGTGC |
| 87 | | 1 | AGGCAATAAATAAAAT |
| MI00 | 1 | 10807025 | GCACCTTTTCTGAAATCTATCAATCCAAAGCCTCT[A/G]AGGTGCTCAAAAACATTCCT |
| 88 | | 7 | AAGGGCATTTAGAAC |
| MI00 | 1 | 11064520 | CGCTCTCAATCCCACCTGGTTGATAGCCACGGGGG[C/G]CCTGCGGATAAAATCCCGA |
| 89 | | 6 | GAAAGGATTTTCCTTG |
| MI00 | 1 | 11139061 | GACTCTGACTTTTTCCTCTGCTTCTAGTATCAAGT[C/T]AGGTCCAAAAATTTCCCTCT |
| 90 | | 3 | CTCCAGCTTGTGACC |
| MI00 | 1 | 11140153 | GCGCTCTGCTGAGGCCTTGTCATATGGTTCCTCTT[C/T]GTTCTTTATGTACCTGATGAT |
| 91 | | 9 | CGGCTCTCTCCAGT |
| MI00 | 1 | 11142507 | CCCATTGCTTGGTACCAATTCACCGCAGCTTTTAG[A/T]GGAAATTATATTCCACCGGG |
| 92 | | 2 | TCTAATGGCAATGAA |
| MI00 | 1 | 11234141 | GAGATCACTGTAGATCCTCAGCATGGACTCGACAA[C/T]CCTGTTATGTTTTGGGATGA |
| 93 | | 3 | CATTATTAAAGGTGT |
| MI00 | 1 | 11710565 | TATACTTAGATTCAAAGGGCAGGTGGGGGTGTTTC[C/T]GGATCCGAATTATGTATCGA |
| 94 | | 2 | TCTCCTTGGGCAGAA |
| MI00 | 1 | 11863509 | TAGGGGCAAGAGCATTGTCGCCACCATTGCTGGCT[A/C]AGGGCAGTCATGGTGAAC |
| 95 | | 0 | CACCGTCTCTAGACACG |
| MI00 | 1 | 14273021 | CACATGCTTTTCCTACTTCAATGTTCTTCATTTTG[C/T]TGTCACACCATTCACTACTAA |
| 96 | | 8 | CAAAGAGAACTTTC |
| MI00 | 1 | 14721174 | GCTCTAACTGTCGTGATATCGATTGTCCGACACCA[C/T]CCCCGAGGGCACGTTCGGA |
| 97 | | 9 | CCCAAGCGCGGCCTCC |
| MI00 | 1 | 15212069 | TTTGGTAGCTCCAAACATACCATGGTTTTGATAAA[C/T]AGTGTTTAGATACAACATTG |
| 98 | | 7 | TAAACTATAGTATTA |
| MI00 | 1 | 15242686 | ATTAAAAAGAGATCCCTGTTTATTTCTTGATACTC[C/T]CTGATGTGTACGTTTAATTGT |
| 99 | | 9 | GAACCAGCCCCTGC |
| MI01 | 1 | 15429503 | GCCAGAAACAGAGGGGCTCTTGTGCTAATGTGTAC[A/G]ACGAAGGGGTAAGTACAG |
| 00 | | 3 | ATCTCAGCCATCCGATT |
| MI01 | 1 | 15509730 | GTAATAAAAACTCACCACAACCCTTGGCTCTTCCG[C/T]GAGTCATTGTAATATTGTAC |
| 01 | | 0 | CGAGTGGGGCAAGAG |
| MI01 | 1 | 15792361 | TCCTCGCTCTGATCCTCCTCCAGTGCACTGCTCCG[C/T]TCCGGCGACCTCGCTGCCG |
| 02 | | 2 | GCCCGGCGCTCCCCGG |
| MI01 | 1 | 15929227 | TAGCTGGCCGAATTACTCACCGAAGTCGTGTACCC[A/G]CCTCCTGCTGTGGCCAGCT |
| 03 | | 5 | TACCGCGTTGCTTCAC |
| MI01 | 1 | 16563334 | AGAATGGAATTTCCATTGTCATTGGTGCATTCCCA[C/T]TATTATGTTTACAAAAGGCTA |
| 04 | | 6 | GCATTAGTTGGAGA |
| MI01 | 1 | 16694341 | TGGACCTGCCACCTTTCGACGTTGCGGTTGTTCAA[A/T]TCCTTCTTGAGTGTCTCTGA |
| 05 | | 5 | TCCTGCAACCCGTTC |
| MI01 | 1 | 17018574 | TATGGGGGTTACTTAGAGTAGGAATTGGCAAGCTT[C/T]GGTGTATGTCAAACTCGATG |
| 06 | | 3 | ATGAATTTAAACATA |
| MI01 | 1 | 17189310 | TGGGGATATCCTCCTATGGGACAGTCATAAACGTC[A/G]CAGGGATTTGATCCATGGTC |
| 07 | | 5 | GACACAAGGATCATA |
| MI01 | 1 | 17324087 | ATCCAAGCCACCAGAACGCAAGGAGCCTATAACAA[A/C]TAGCTGTTAAATAAAAGAT |
| 08 | | 1 | ACAATACTGTATTAAA |
| MI01 | 1 | 17842856 | ATTTACTTGTGATGAAAATTCATCCAGCAGCACAG[A/C]ACTCAGCAGTTAATTAGTTA |
| 09 | | 2 | GTTCAACACTGACAG |
| MI01 | 1 | 17926581 | GAATCGGCGACAGTAAGAACCATGCCCGAAAAAAC[A/C]GAAACAAACATGACCATA |
| 10 | | 8 | TCAATAAGTGAAAAGCG |
| MI01 | 1 | 18042907 | TTAAGTTCACACAGAAGAAATGAAAGCTCAATATC[A/G]GCGGGCACTTACTGAAGG |
| 11 | | 7 | AATCCCAAGAAGCTTTT |
| MI01 | 1 | 18053800 | ATACACGAGACAAAAGTATGAATCGCGTGCATATC[C/T]ACGTTGTTGTCCTCACTATT |
| 12 | | 6 | GAATATTGACACCCC |
| MI01 | 1 | 18075963 | CTTGTATCTAAATGTTTGTAGTAGGGATACAAGCC[A/G]ACCACGAGAGAGAGTGGAT |
| 13 | | 6 | TTGAAGTCCCTAGTGG |
| MI01 | 1 | 18231938 | TATACCACATTAATTAATTCTAGGCATGTGTGTTT[G/T]GTTTCACATTATAAAGTGGGA |
| 14 | | 8 | TTTGTCAAACTTTG |
| MI01 | 1 | 18252481 | CAAAAATCCATAGATGTTTTTGACAATGGGGCATA[A/G]CCCCTATTTAGTTAGAAAAT |
| 15 | | 6 | AGGCAACATAGGTTC |
| MI01 | 1 | 18252490 | TGAACAAAGGCAACAAAAGTTAGCCAACATGCGGC[C/T]AGACGGAAAGGCTATGCT |
| 16 | | 0 | AGGCGTCCTAAACAATA |
| MI01 | 1 | 18494165 | AAGTTCAGTGCACTACGCTGACACTCCCTCCTCTC[C/T]CTGCGTGCACTGCTGCTAG |
| 17 | | 9 | TACCAGCAGCAATAAG |
| MI01 | 1 | 18743443 | AGAGAGAGAGCTCAAAGCTGTACCACTCGAGCTGG[A/G]AAAAAAAAGGTCCTCCA |
| 18 | | 6 | CCCAATAATCTTGGTGAG |
| MI01 | 1 | 18766967 | TTTATTATTAGAGTTTCGTGGCGGCGGTTTGGTTG[G/T]ATTGGTCCGCATTTATGAAGG |
| 19 | | 1 | AATGTTCTCCCCCT |
| MI01 | 1 | 18896497 | TTACCAAAATAACACACATGACCACATCTCAATCA[C/T]GTGTTCACAAAATTATTTTA |
| 20 | | 1 | GTTCCTAGAAATAAT |
| MI01 | 1 | 19012855 | ACTAGAAATCCATGTTGCTCACCGGCAAACATGTC[A/G]GGCGGCGTGAATTTGAGGC |
| 21 | | 1 | TCGGCGGGATCTCCCC |
| MI01 | 1 | 19056767 | GACTGAAGAGAGCAATGCAGAGATGATTCGCCTTC[A/G]CCCACTGCTTGATCCATCG |
| 22 | | 7 | TATCGTATCGTATCGG |
| MI01 | 1 | 19059513 | GGCAACCAAGCGTGTAGCAGCTCGGACGGGGGTCG[C/T]CCGTGGAGGGTCACCGGC |
| 23 | | 2 | GACTAGAAATAGCAGGC |
| MI01 | 1 | 19459096 | TTCTCTAAAATTTAGATTACAGGGCGCTTTAGATA[A/T]ACTGCTCGAGAGAGTCCTAC |
| 24 | | 4 | TGCAGCGCACTGCGC |
| MI01 | 1 | 19518089 | TGCACGCGCTGGAGCCGATGTGACTACAACCACGA[C/T]ACTTGGGCCTATCGCTGCG |
| 25 | | 0 | GATGTAGGACCTCTGT |
| MI01 | 1 | 19646555 | TACAGTTCACCACCTCTTTCTAACAATAACAAAAT[C/T]ATCTAAAACCTTGCCTCCTT |
| 26 | | 1 | GAACATGGACCGGAA |
| MI01 | 1 | 19680778 | ATGGTTCTGATGGGCCGAGCGTCCAACTGTATGAG[C/T]TGGTCGTCTAACTCAGACC |
| 27 | | 1 | AAGAGACGGTGGAGAA |
| MI01 | 1 | 20067468 | GAAAGGAGGCGTTCCACTCAGCTGAGATATGCATA[C/T]AGCAAATATTCCAAGCCCG |
| 28 | | 6 | AAAGTTCTGAAGAAAT |
| MI01 | 1 | 20203276 | ATACACATGGATCCGATATGGATTTGTAGATCTCC[A/G]CCCGCTTTCGACTTCGTATGT |
| 29 | | 1 | TACCGATTGTGATG |
| MI01 | 1 | 20204238 | GACAAGATGCTTCCATGAGTTAGGGACTACTACAT[A/C]GGGAAACAAAAGCAGATTA |
| 30 | | 6 | GTTCTCAGTCCGCTAA |
| MI01 | 1 | 20411305 | TTCTGACAGCGGCTAGGTTCAATTCGATCACTCTC[A/C]GGACGAAACGAAGCGGAC |
| 31 | | 2 | GTGTACAGAACATGACG |
| MI01 | 1 | 20429489 | TATATATGCGCGCGCAAACTGCCAACGACCTTTTC[C/T]CTTTGAGCGTGAGTGACAC |
| 32 | | 6 | AGATGTATCTGAATCA |
| MI01 | 1 | 20836291 | CGTCGCCGAGGCCAGGTGGTTCTGTAGGTCCAAAC[C/T]AGCTGCTGCAAGTCCACT |
| 33 | | 7 | CCCAGTCACCAAGTTCG |
| MI01 | 1 | 20913718 | ACATTGGGTTATAAGGTCAAGCTTTTTGGTCGACA[G/T]ATGGCATCATAAACATGCTA |
| 34 | | 6 | GAAAAAGCACAATAA |
| MI01 | 1 | 20957700 | AGAGAAGACCTCCACGACGGTTGTGGTGCAGCATG[G/T]CGGGAGTGCTGTTGCAGC |
| 35 | | 5 | TCACGATTGTCAGAGTG |
| MI01 | 1 | 21303040 | GTTCAAAAGTTTACTTATGCCAGGAATGAGTGCAA[C/T]AATATCACATAGCCTAAACT |
| 36 | | 4 | AATGCTATGTGATTG |
| MI01 | 1 | 21338048 | TTATTATCGATGCCTTAGGGGGATTGAAATCAAAT[A/C]CTCAACATTGGCACCCACCT |
| 37 | | 9 | CCAGTGATTCCACGA |
| MI01 | 1 | 21477819 | TCCATCGTGACCATATCAGTGGTGATGCCAAGATT[C/T]GAGCCGACTACTTCTGTGCA |
| 38 | | 9 | TAACCCGTGTACACG |
| MI01 | 1 | 21477842 | AGTCGATCTTTACTTCGTTCAGCGCCCAAATTGTG[C/T]TGGGGAGCTTGGTCTCTCTG |
| 39 | | 5 | CTCTGCAGAAGGTTG |
| MI01 | 1 | 21544929 | GATGCAATTGCTGCACTGAAGCGTTATATAATAAT[G/T]TTCTACTTGATGGAAAAGCA |
| 40 | | 7 | ATGAAGAAAGAAGTC |
| MI01 | 1 | 21558402 | ATAAAAGCTGCATCGGCAAGCCGAACACAAACCTA[C/T]GATGAAGAGAGCAGCTCA |
| 41 | | 5 | CCTGCAGAGGAGAAATG |
| MI01 | 1 | 21663234 | ACAGGACAAGTCGTTTTCGCCAACAATAAGAAATG[A/C]TTCTATCTAGTATCTAGAA |
| 42 | | 2 | GATTACATATCTAGAA |
| MI01 | 1 | 21767143 | TTACATCAGTTATTGTGTTTCAGGTGTACATATAA[C/T]ATTTCATTAATAGTTGTCTTC |
| 43 | | 8 | CTTCTTTTTTTGTA |
| MI01 | 1 | 21960166 | AGGGAGGATGGGCCAAGCGAAGAAGATGAGGGTCC[A/G]AGGAACCAAAAGCAAGG |
| 44 | | 0 | TGGATAAGATAGGGTGAG |
| MI01 | 1 | 22042897 | AATTTGCTTGGCTGTTGCTGCGAAGGTGATGAAAG[A/G]TTGCTTGTTGCAGAATACA |
| 45 | | 7 | TGCCCAATGATACGCT |
| MI01 | 1 | 22259850 | GTTCCAAGATGCTTTGACAGGGCAACATGACCATT[A/G]AATCGGCCGGGCCCACAA |
| 46 | | 5 | GTTCACCCAATTAGACC |
| MI01 | 1 | 22337106 | TCCCGGAGGCTCTGTAAAACTTTGAAACAAGGCGT[A/G]TAGATATCTAAAAACAAGA |
| 47 | | 9 | ATATCTAGTTAGATCG |
| MI01 | 1 | 22661685 | TGGTTAGGTGGTAGTACAAAAATGATATTCGATTT[C/T]AATGCTGTTGGGGGTACTGC |
| 48 | | 1 | TAGTGAATAGGACCG |
| MI01 | 1 | 22811688 | TAAGCTCCTTGGTTCTACAGTCCCTTGCCCTTCTT[A/G]ACCTCATAATCCAGATACATG |
| 49 | | 2 | TGTAAAAACAGCTT |
| MI01 | 1 | 22832121 | CGTCAGACCCTGAGCCATGGTCCAATGAGTACGGT[C/T]GGACTAGTATGATGCAACG |
| 50 | | 3 | AGGACCTCTCTAATTA |
| MI01 | 1 | 22938224 | GGATTCATGTCGTCACCCCATCACCTTCTAGTGGA[C/T]GCCAATCGACCCCCACTTCT |
| 51 | | 6 | CCTAGCTTTGGGCGA |
| MI01 | 1 | 23043652 | AGACATAGCGTAGCCTTAGCTTAGATCTATTTGTG[A/G]CCTAGCACAACCATCTCTCT |
| 52 | | 6 | TCGACTCTACGTCGA |
| MI01 | 1 | 23052497 | GCTTTCGCTTCCACTTCCTTGCAAGTTATTCTTTT[A/C]CCAGAGAACTTCAATGGCTG |
| 53 | | 5 | GAGGTAGAGGTGCTA |
| MI01 | 1 | 23053364 | TGACTTTTATACCATGTAGGAATATAATGGAGGGT[A/G]TAGTGATTCTTCATGAGACTA |
| 54 | | 3 | TTCATGAATTTCAT |
| MI01 | 1 | 23065458 | TCTAGGCTTCTACTTCTTGGTGTCTTAGATTTTTT[G/T]AATGTCTTCAAGGTCTTCAAC |
| 55 | | 9 | ATGGATACTAATGT |
| MI01 | 1 | 23102029 | AGTCATGTGGTATTCCCCCCAGTGATTATTCCCAT[A/G]GCATTCTCATAGATGGACTCT |
| 56 | | 0 | GCAAGCAAGGTAAA |
| MI01 | 1 | 23384675 | CACTCTTTATTGAGTATATCATCTATTGTCTCTCT[C/T]AGATGCTTGTTGTCATAGTTC |
| 57 | | 7 | GCAATTCCTATCTG |
| MI01 | 1 | 23752764 | CCGGGAATATCCAATCTAACGGAGTAAATACAACA[A/C]TGCGCGTACAGTAAACAGT |
| 58 | | 5 | GCGCACCAAATTACAC |
| MI01 | 1 | 23956652 | TGTCTAATTCTCTAGTGTGTGGGTCAGTACCAACT[G/T]GTTCGACTCTAGCATAGTTG |
| 59 | | 5 | ATATCGATCGGGCCA |
| MI01 | 1 | 23995691 | GAGCTCCAAAACATGGGACCAGCCAGGGTCGCAGT[G/T]GCACTCGTAGCCGGGAGG |
| 60 | | 6 | AAGAAGGGCCGGAGCCG |
| MI01 | 1 | 24020545 | TATTAGATGAGATAGGATAAATGCTACCTGCTGGC[G/T]CCTAGAGACAGCCTTAGCTA |
| 61 | | 8 | GCTCGAGCCGACTTT |
| MI01 | 1 | 24244933 | TCCTTAAGCGCCCAAACTCCATAGACTCATCGCCC[A/G]CCATAAGGTGAGCACGAGA |
| 62 | | 4 | TTCCGCTGGCGACGAT |
| MI01 | 1 | 24248021 | TTATAACTAGATCCAATATGTTTGAATATGCAGAA[A/G]TGTTTACTTGCCCTAGTTTTA |
| 63 | | 8 | CTCTAGGACATGTC |
| MI01 | 1 | 24556017 | TATTCAAAGACAAGTGATTCAATGGCTTCAAGGAC[A/T]GGGCTTCAATGGCTTCCAC |
| 64 | | 8 | GAACTCACCCTCCTTC |
| MI01 | 1 | 24678109 | ATAATTAGGAAGTGTGTGGCGACTCTTTTGTTGTT[C/T]GAAAAAGATGCTTGCTTTTT |
| 65 | | 7 | TCCTTGAGAGATGAA |
| MI01 | 1 | 24687067 | TGACTTGATTTTTGGCTTGAATGGCAAATGCTCTT[G/T]TGTAACTGCATGTGGTACAT |
| 66 | | 2 | CTGGACTGTGGATGG |
| MI01 | 1 | 24740071 | CCACTGAGATTGGGCTGGATCGGGTTAAATTGAGC[C/G]CAGTACTGTTGATACTTTTC |
| 67 | | 3 | TTTTTCCTTTTCTAC |
| MI01 | 1 | 24879985 | TCTAGGATATTCACTGGATTCACCTCATGCACATG[A/G]TCATGGATACTGAGCCACAG |
| 68 | | 8 | TTTTAAAGTCTTGAG |
| MI01 | 1 | 24892784 | TTGTGCAAAAAACGGCCACAGTGACACAGCCTTAT[A/G]TATAATCAAGCTGTGAGCT |
| 69 | | 9 | TGTGACTGTGTATTCT |
| MI01 | 1 | 24998236 | AGGGCAACGAAATGTTCACTGCCTTACAGCAGAGC[A/G]TGAAGGCTTCGAGAGCCA |
| 70 | | 4 | GCGCCCAGTCAAAGGCA |
| MI01 | 1 | 25150217 | CACTGCCATCACAGATTCACAGTGTGGCATGCACG[G/T]CAGCGTTTACTAGTCGTCT |
| 71 | | 2 | AAAGGTACTGACAAGT |
| MI01 | 1 | 25236202 | GGCGACGCCATCTTTTTGTGGTTTCCTTTTTTTTG[G/T]TTTGCTTAATGACGAATTGGG |
| 72 | | 1 | CTGGGCCGCTGGGC |
| MI01 | 1 | 25243804 | GCGGACCAGAAGAGTACTCCTTCGGTCCTTCCCTT[A/C]CTAATCCTTTAGTAGTAGAG |
| 73 | | 2 | AAGAGGACGATCGGG |
| MI01 | 1 | 25285220 | TTGGCGCTTGCACGCACTATTATATTGGTTGTACC[A/G]AGAGGGACTATAAGTCTTAT |
| 74 | | 1 | CAGATCACACTAACT |
| MI01 | 1 | 25395497 | CAATCATCAAGAGGCGAGGCGAACAAAGCTTTTCT[C/T]CGAGTATTAAAATATTCATC |
| 75 | | 7 | TGGGGCAGTGCTCGA |
| MI01 | 1 | 25395914 | ATCAAGCTGAGTAATACTGACAACCTGTACTAGTT[C/T]GGTAGTTGTAACTAGCACCT |
| 76 | | 5 | GAGCTACAAGGTCTG |
| MI01 | 1 | 25604637 | AAACATTTGAACCATAAAAGCCATAAGATAGCAAT[A/G]TTTCTTCCATATCACTTTCA |
| 77 | | 6 | CTTATTGCTTGAGTT |
| MI01 | 1 | 25642982 | TCTTAAGACCTTCTTATCCTCAACATCCATCTGTA[A/G]ATCAAATTCTTGAAGAAGGT |
| 78 | | 1 | CCCATAAGGAGAGAA |
| MI01 | 1 | 25933163 | GTTGTCCCCACGACAATCTAGTACAACCTTTGCTT[A/G]TATGTTGCACCTTTGACCCT |
| 79 | | 2 | GAGAAGTGGTGCCTC |
| MI01 | 1 | 25985986 | TCTATACTTAGATTCACATTCAAAATTTGTGTGAT[G/T]AGATTATACCATAACCCCAAA |
| 80 | | 1 | TTCTGTCCGACCAG |
| MI01 | 1 | 26247910 | ACACAAAATGCTGCCACAAATAAAATTTTGGAAAA[A/C]ACGCACACACTATGGTCAA |
| 81 | | 3 | GTATATGGAAAACAAG |
| MI01 | 1 | 26466258 | AGTCCGGCGCTGTTCTGTAAGTCGTCTAAGCATTG[C/T]GTTCACTGGCTCACTGCAG |
| 82 | | 2 | CTACTCTACACCAGCT |
| MI01 | 1 | 26538430 | TTCTCCTCCTCACCCTTCTTGATGGAGAGCGCCCT[A/G]CCGCGAGTTGCTTTCAGTAC |
| 83 | | 9 | AAGCATCGTAGCTCC |
| MI01 | 1 | 26632531 | AGTGAACATGTTGTTTTGAAAAGCTAACTCCATTC[A/C]TAAGGTACATTCATGTTTGA |
| 84 | | 0 | GTATATTAGAATTAG |
| MI01 | 1 | 26823700 | ATGGAGATACCATTATTGTACTAATTTATCAGGAA[A/C]AGTTGTAAATTGAACTGGTT |
| 85 | | 0 | GGTTTGGTGTGTCAT |
| MI01 | 1 | 26901083 | TCGTTTTTTTTGGGTGGTGGTCGCATAGGCTTGTG[A/G]CCTAAGACAAAGTAGACAA |
| 86 | | 6 | GCACGTCGGGTCGGAT |
| MI01 | 1 | 27057241 | CTCGGGGTGGAGTTCGAGTTTGTCCCATTGCTGCG[A/G]TCAGTGCACGAGCTGGATC |
| 87 | | 8 | GGTCGGATTTCTTGGT |
| MI01 | 1 | 27079746 | ACCTTACCTAGTCGGGCCGGGCCAATGTGTTGGGC[A/G]GGCTCGGGCTTGGGGCAA |
| 88 | | 8 | AAATTAAACCTGTGGGC |
| MI01 | 1 | 27174699 | ATGTTTGGTTCGGGAGCGAATAGAGTGGTTGGAGC[A/G]GAGCGACTCTAAATCGGG |
| 89 | | 1 | AATATTACCACTAGACT |
| MI01 | 1 | 27270910 | TTCTCCCTCTCTGATCCTCACCGAAGGTGCTCTCC[A/G]ATTGGGTCGTCGCGATGGTT |
| 90 | | 3 | CGATTTGATGGATGA |
| MI01 | 1 | 27271942 | GCCAGATCCGCTCGAGGCTGACCAGATTCAGGTCC[A/C]TCCGCAGTGGTGCTTCCAT |
| 91 | | 3 | TATTCATAGGCCTGCA |
| MI01 | 1 | 27309969 | TGTCGAGATATCTGTTTAGGTTTAGGGGTCGTTTG[A/G]AAATCGAGTTACTCAGATGG |
| 92 | | 9 | CAACTATATAGTGGT |
| MI01 | 1 | 27590086 | TGTCCCCAATCTGTAAAAAACAACGAGCACCCGGC[G/T]GTGGTGTTTGGTAGTACTT |
| 93 | | 9 | TTTTATACTGCTTGTA |
| MI01 | 1 | 27597724 | TGGTTGATGGAGACTGCTAGTGCCTGTATTGTATC[A/G]CCAATCATGTTTACTCTATAG |
| 94 | | 4 | TGTATACAAATCGT |
| MI01 | 1 | 28016175 | CCAGATACTCTACCTTTTTAAGTGTTTAACGCCTC[A/G]ATGATGACAAAATACAAGTA |
| 95 | | 5 | ATGGTGTCATAACCT |
| MI01 | 1 | 28089730 | TACTATTGCTTGAGTGTCGCCTTGTTCAACTTCTC[A/G]ACCAAGGCAGAGAGAGCTT |
| 96 | | 8 | TCATCCGGCAGCCGCT |
| MI01 | 1 | 28127457 | GCTGACTCTTCTTGAATTCCTTCCTGCTCATTTTC[C/T]TGTGCTGGCATTGCGAATCGC |
| 97 | | 4 | GCAACCGCAGGAAC |
| MI01 | 1 | 28146988 | TTTTTGCATAGTTTGATCGCTAATGCTGGTAATGT[A/C]CAGGTCGATGTGAAGAGGGC |
| 98 | | 1 | AGAAAAGAAAGAAAC |
| MI01 | 1 | 28396767 | GGTGTCATTGTTGATCCATAACTCACGCTTATTTA[C/T]GAAGCAAGAGTGACATTTCT |
| 99 | | 1 | TCGGATCCATAACTA |
| MI02 | 1 | 28521057 | TCGATAACGATGTGGCAAGTCTCCCCCGGAGCTTT[A/G]GGGCCGACCAGACTCTCCA |
| 00 | | 1 | CCGAGACAATGGTGGC |
| MI02 | 1 | 28529955 | GATTGAAGACGACCTGCATGCGGATGAGACCATAG[A/C]TATTTTCGTAGGAAACAAT |
| 01 | | 2 | TACAACACCTACACTT |
| MI02 | 1 | 28541068 | AACTCATGAACACGAACTGCTCTGCTGAGCACACT[A/C]AAACCAAAACTAGATTATT |
| 02 | | 1 | GGTTCGTCATTATTAC |
| MI02 | 1 | 29029741 | GCAATTCTACTTGAGGTTATTGGTTAATCATTATC[A/G]TATCACGTGGCATCCAATGTT |
| 03 | | 8 | AATGTTCATCTTGG |
| MI02 | 1 | 29089129 | CAAATTCAAGCTGGGCTATGATTGGGCCTCTCTCC[C/T]TGCTAACATGATGGGCTCGG |
| 04 | | 0 | CTCATCTAGCACAGG |
| MI02 | 1 | 29089165 | GAATAGAATCCCTAGTTCGTCCCGGCGCGCGCGTC[A/G]CGATCCCGACACCAAGCTG |
| 05 | | 6 | GGCAAAAACCAAAACT |
| MI02 | 1 | 29168788 | ACTACTTAAATTTTTACTTGTGGAAACGGCATACA[G/T]GCAGTTAATTCTGGATTCTA |
| 06 | | 6 | GCATTGGAGAATTGG |
| MI02 | 1 | 29398351 | GCGGCGATGACGAGGCAAGCACGACGATAAGATCG[A/G]TGGGGATGGCGATGTTCC |
| 07 | | 2 | GGCAGGACGAACCCGAA |
| MI02 | 1 | 29457938 | GTAAAATTTAAGGATTGGATCATATTTGGATCTTG[A/C]TCTATTTCTATTCATTCTTGA |
| 08 | | 8 | ACTAAAATTAATTA |
| MI02 | 1 | 29462596 | AAGGACGGGGTGCGGCATCAAGGCCGGGAAGCACG[A/G]GCCACGCAGGAGGACAA |
| 09 | | 2 | CAGATGTAAGACCCAAAA |
| MI02 | 1 | 29570871 | ACACTCTTTCTCTTAGTGGAAAGACCCAGATGATG[A/C]GGGCTTATTAAGGCTTTACT |
| 10 | | 5 | TACAAAGGCCAAAGG |
| MI02 | 1 | 29595632 | CGTGGCGTGCCGGAGAACCGGTTCTACAACCCTCC[C/T]CACGTACGTCGACAGCAG |
| 11 | | 0 | CAGCAGGAGCAACAGCG |
| MI02 | 1 | 29678760 | GTTTGCACCAGCAGATATGTTCTCCACATGAGACC[C/T]AGAGTGAAAAAAAATCACT |
| 12 | | 5 | AAAACATTAACTACCC |
| MI02 | 1 | 29927618 | CTGGCTAAAGCAATGCAAAGTCCTGGTTTCCTAGC[A/G]CAGTTTGTACAGCAAAATG |
| 13 | | 8 | AGAAGAGCAGAAGAAG |
| MI02 | 1 | 29949764 | CGTCTCTTAACATCTCCCCGTTGATCTTCTCCGTT[C/T]TTCTGCAGTGATGTGACTGA |
| 14 | | 6 | AGAGATGGCAAGAAG |
| MI02 | 1 | 29983020 | CATTACACGCTAGAGGCCCTTTCGCAGCTAATGTT[A/G]GATGTAGTGTACTGGAATTC |
| 15 | | 7 | TAATTTCATCTCATG |
| MI02 | 1 | 30021241 | CCCTCAGCAAAAGTACGCTTGTCTACTGCAATAAC[A/G]TCAACGTCGTCTACCCTCT |
| 16 | | 9 | CCATCAACCCCATCTA |
| MI02 | 1 | 30050229 | CCCCATGAAACGGCAAAGCTTTCGGCTTTCGCCTT[A/C]ACCTCGTATGCGTTGCCAA |
| 17 | | 9 | GCCTGGCTTGGTTAAC |
| MI02 | 1 | 30051593 | TTGCTAGGCATTTCTGGTTTCGTTTGCTCGGTCAG[A/G]TTAATTTGCAGGGATTCAGC |
| 18 | | 9 | CCCCAACCAGGTGAA |
| MI02 | 2 | 750292 | GTGGAACCAATCAACCCTAGCCATGTAGAACCTAA[A/G]CATCAGAGTCTTTACAGTA |
| 19 | | | ACCCAAAATTGGGCGG |
| MI02 | 2 | 2372065 | GAACTAAGGAGCTACAGCAGGGGCTGTTAAGAAAA[A/G]TATATCCTTAGCCCCTGCA |
| 20 | | | AGTTCCCAAAAAATGC |
| MI02 | 2 | 3233845 | ATCCCCTTGCCACGCTCGCCATCGCGGTGTTCTTG[A/G]TCTGCCTTCTTCTCCCCACT |
| 21 | | | TCGTCTTCTTCGTCA |
| MI02 | 2 | 3379765 | AGAAGTTGAGTGTGGGAGGGGGAGGGTTGTGGTTC[A/G]ATATGGGAGGGATGTTGG |
| 22 | | | AGGAAGACACATGAAGA |
| MI02 | 2 | 3754733 | ATACTCCTCCTGCTAGATGTGAACCTGCAACGGAC[A/G]GTGATAGTAGAACAAGCGA |
| 23 | | | GAGTGCCGCCGCTCTC |
| MI02 | 2 | 5111263 | ACACAGCACAACAGCTGACCAGACAAACCACTGCG[C/T]CATTCAAACCAGCGCCTG |
| 24 | | | CCGATTAAAGAGGCCAA |
| MI02 | 2 | 5276017 | TATCCACATGAGCAGAATAAAAGAGTCGGGGATTT[A/G]TATCTTCTACGGTTGTACCT |
| 25 | | | GAAAGGTCAACGCTC |
| MI02 | 2 | 6468284 | AGAGACTAATAGTAGACAGACAGTAATACAGTATA[C/T]GTACATACATAGAGTCAACT |
| 26 | | | ATTAACAGTAAGACA |
| MI02 | 2 | 6986622 | CGAAACACTAGTTGAATGAGGATCCGATATTCTTT[A/C]TGAAAGATGGGCTGGGCAC |
| 27 | | | ATTTGAACTGACTGAA |
| MI02 | 2 | 7185307 | TGAGAGCTCTGAAGTAGCAGAAGAACATATATTAT[A/G]GGATCATCTCATCTGTACAG |
| 28 | | | ATGTCAATAATCTGC |
| MI02 | 2 | 7270898 | CATGCCAGTGCCCTGATGGGTTTGAGCTCCTCAAC[A/G]GTCTAAATTTCTCTAGAGG |
| 29 | | | ATGCCGGAGAAAGGAA |
| MI02 | 2 | 7329531 | TGCTAGGGAAACACCAAACAGGGAATGTTCAGAAC[A/C]ATCTACTATGCTTGAATCC |
| 30 | | | TCCCAACGAATTTGGG |
| MI02 | 2 | 8914166 | CTCTGAAGAAAAGGGAGAGGAAAGACAAGAAGAAG[A/G]CTGCAGATGCTGAGAAG |
| 31 | | | GCAATTGAGACCGCACCC |
| MI02 | 2 | 9452388 | TTGGGAATTTTTTCGGAGCAACGCGAACCAGGCAG[A/G]ACCGCAGAGAGCACGAGT |
| 32 | | | GAAAGGAGTGTAGACTT |
| MI02 | 2 | 10148921 | AAGAAGCTGAGATCCATTATAAGCAAAAGGTGTTT[C/T]TTTCTCTGAGGTTTCCATTT |
| 33 | | | TTGGGCTCTGTGCTA |
| MI02 | 2 | 10492681 | CTCGGTCTAAAGTAAGCATGTGGCTTCGTTCCCTT[A/G]GATCTGGTTCAGGACTTTTG |
| 34 | | | GTTTGTTTCTTTGGG |
| MI02 | 2 | 13321078 | TCATGGCAGATGCTCCCTTCCATAGCTTTGAGCTC[C/T]GTAGACATGCACGCTAAGGT |
| 35 | | | ATCCCCAATGTGGGT |
| MI02 | 2 | 14343191 | TCTTTGGAAGGTGTATTTTCCCTTGGAAGAGCAGG[A/G]AATTTGACTGCCGAATCGT |
| 36 | | | CTGCCGGAAAAAGTGG |
| MI02 | 2 | 14472563 | TATTTCTAGGTGCGAAAACTACTGGCAAGGACCAA[A/G]GAGACCGTTTGCACCAGAT |
| 37 | | | TGGATCATAAAGAACA |
| MI02 | 2 | 14902322 | CTTTCTTCTCGGGAGCGTCCATTGGAATGTACGGC[G/T]GCGGCTCAAGGAGCATTCA |
| 38 | | | CGAGGAAATCTATGTA |
| MI02 | 2 | 14903218 | CGACGACGACGACGGCCGTCGCTATTGCCGTGGGA[A/C]TCGCTCTGCACTTTCTTCC |
| 39 | | | GGCCATAGCTAGTAGT |
| MI02 | 2 | 15866437 | ATATCTCCCTTGTGTGTGTCGAGTATGCGTGCCTC[A/G]TGCTGAAGTTGGATGCCATT |
| 40 | | | TTTTTAGAACATAAA |
| MI02 | 2 | 17557757 | AGCTTTTTTTTTAATGGCGAATATGATCGAGATAT[A/G]GTGGCAGCCCCATTTGGAGA |
| 41 | | | GAAGGGGGCCCTCCA |
| MI02 | 2 | 17959632 | GTAGCAGCAGCAGTACGTGGATTGGCTGTTGATAT[A/G]TATACGACATGGCATCCTAG |
| 42 | | | ATTTAAAATGTCTGG |
| MI02 | 2 | 22041965 | GCCAAGATAGTGGTGCCAACCAACTCACCCCGTCA[A/C]CCAAAAAAAATGCATGCC |
| 43 | | | AAATTCTAGAGAGAGTA |
| MI02 | 2 | 22128902 | CGTACTCCACTATTGCTCCCAGCAACTCCCAAGCG[C/T]GCAAGAAGCAACAAGTGA |
| 44 | | | GTTATGGTGTGAGGCCA |
| MI02 | 2 | 22441022 | TAACGGAACGGTACGGATACAGACGTGCAAACGGA[C/T]AAGCCTTTGTTTTTGTTAT |
| 45 | | | CCGGGGCTTCCAATAT |
| MI02 | 2 | 22659023 | TGGTAATCGTCAATGGCACCTTGACAAAACATTTT[A/C]TTATCCTCCAGGTTCCTTTAT |
| 46 | | | TCATGTTTACTAAT |
| MI02 | 2 | 23235700 | CTGTGACAAACGTTGCCTTACTGGCATAGGGTTAC[A/G]CAGTATATATTCTGTAGCAA |
| 47 | | | AAAGAAATATGTTCA |
| MI02 | 2 | 23717407 | GAAACGACCGCACTACGAGGCCACCTAACAACGGC[C/T]GCAGCGGCACTAGAGAAC |
| 48 | | | AAACGAGCAATCTGTTT |
| MI02 | 2 | 27476344 | GGGGGGAGAGAGAAGGGAGCATGAAACAGGTAACA[A/G]CATTCTAGATTATCCAAC |
| 49 | | | GATGGTTTAGAATTTTG |
| MI02 | 2 | 29302232 | ACCGCGCACGACGCGATACAGTCCAGAAGCCATGT[A/G]TGAGGAATGGCTTTGCAG |
| 50 | | | CCAGCCGTGGTCGCCAG |
| MI02 | 2 | 30944169 | CTTGACATTACTTGTTTCCTTAGAAGAGGTCTCTG[A/G]AAATTTGGGACATTGTTGTT |
| 51 | | | ATGTGAATCTCTGTG |
| MI02 | 2 | 32771740 | CTACACCAGCCTGAATAAGGCTTATCCCAAGGACT[C/T]GTATCCACTTCCACGCATAG |
| 52 | | | ATCAAATCGTGGACT |
| MI02 | 2 | 34162472 | TGACCCATGCGTCAAAAGTTCATCATAAAACGTGG[A/G]ACAGCTGTACGTTCCCGCG |
| 53 | | | TGCAATGGTGGACATC |
| MI02 | 2 | 34990440 | TGCTAGGAACGAGAGCTTTCCTCTAAGGAAGCTAG[A/G]AACGAGAGCTTTCCTCTCT |
| 54 | | | CTTTCTTACACTTTTC |
| MI02 | 2 | 35168369 | AGTAGGATACACTAACTGGTTGCAATTATTCCAGT[C/T]TGGTTTCGCGTTTATTTTTCA |
| 55 | | | CTGTTTGATTGATG |
| MI02 | 2 | 38471467 | ATGACTCCTTCGCCTGTCGAAGCAAACTGAAAACG[C/T]GAAACGCTCGCGAAGTCG |
| 56 | | | CGATAAAATGAACCCCT |
| MI02 | 2 | 38490733 | GCACCGTCGAAACGGCAGTGAAATTGCAAAAGTAC[C/T]TGTAAGCGAGCCTGATATC |
| 57 | | | TGACTGGCGGTGTTCT |
| MI02 | 2 | 39331612 | ATCACGTAATCTAAAACAGAGTGAGAAATAAAAAA[G/T]ATAAAGAAGTAAAGCACA |
| 58 | | | CAACCATCGAACCATGT |
| MI02 | 2 | 46524713 | TAGGAGTAAGTACTGTCCGAGCTAAACCCTCAGAT[A/G]GTACGTAGTACAAACACCA |
| 59 | | | AAAACTACACAGTTCC |
| MI02 | 2 | 47306731 | GGGAATCCAATCAGCGTGACAATCTGCATGGTGGC[A/G]TCCTACCACACTACCCCTG |
| 60 | | | GGTTCAAAAAAGAGTC |
| MI02 | 2 | 49447363 | ACCCCGTGACCGTACCATACGTTCACAACATAACT[G/T]TCAATACAAATATAACATAC |
| 61 | | | AATACACAAGACATG |
| MI02 | 2 | 51438880 | TTCAGTTGAAATAATACTGAGGAACAAGTCCTCCA[A/T]CAGGTGCCACATATTTACAC |
| 62 | | | GATTTACTCTTGACG |
| MI02 | 2 | 51442523 | TGATAGCTGCGCGCCTTTGAAAACATCAGTTCTAA[A/C]AGTAGTGAAGGAGTTTAGG |
| 63 | | | GCAATATAAACAACTG |
| MI02 | 2 | 51739192 | CCCCAAACAAATCAGATGTATGGCCAAAATGATTC[C/T]ATAAACCAGGATAATGGAAT |
| 64 | | | CCAGAGTGAGTATGA |
| MI02 | 2 | 51863660 | CTCGCCAGTCAGTTCGTTACGCAATTGCAGACTAG[C/T]GCTTTCCACTTTCAAGCCA |
| 65 | | | AGCTGCTGTCCTGTCC |
| MI02 | 2 | 53231096 | AGTGTGGACTCGCGAGAGCAAGAGTTCTCCATATG[C/T]TTGTTTGTTCATGCAATGCT |
| 66 | | | TTGTTTTGTATGATA |
| MI02 | 2 | 53728024 | GGTACATCAAGTTTAATCAGTCTATCAGAAAGTTC[A/G]GTTTTGAGGAAAACAAGGA |
| 67 | | | AGATGATTGCATTTAT |
| MI02 | 2 | 54151723 | ACAGAAGAGAAACCAACATAACTGCACGCATTTGT[G/T]TTGGCATGCTTGTGTTGTG |
| 68 | | | GACCATAAAACTTAGT |
| MI02 | 2 | 55758080 | GCTACTTTTATATATTAACTAGTACAATGCTCGCA[C/T]GCTAATCATATTACAATCATA |
| 69 | | | TTTGATGATAAAGT |
| MI02 | 2 | 55967207 | GTAGATTTATAAATTAGATAGGAGGTTGCCTCAAC[C/T]GTTCCTCTCTTCGGGTTTCA |
| 70 | | | ACTCCAAGTCTTATG |
| MI02 | 2 | 56308583 | ATAGCTATTTGCATAGACTACATGATTCAGTGAGA[A/G]GTGTACTTGAGTGGCGGCGC |
| 71 | | | ATCAGTCGCCGCCCT |
| MI02 | 2 | 59981369 | TTAAAGATATAAGATTATATATAATGTAGTAAAAG[A/G]TCATGTGCCCATAATTCTGTT |
| 72 | | | AGGCTTAGGATCAT |
| MI02 | 2 | 60557965 | TCGATGCTCTTAGATGCATATGACCTAAAAGTACG[C/T]AAAAACATAGTGAAAAATAA |
| 73 | | | AAAAAGACTATTGTT |
| MI02 | 2 | 62743981 | CAATTACAATGCTTTTCATGACCCCATTTGGTTTT[C/G]CTTTCTGTTTTCAAACAACTC |
| 74 | | | TGAGATTTGGCTCA |
| MI02 | 2 | 63605789 | GGCACACTACTAGTAGGTCAAGTTAAGACTCCACT[A/G]TCAATTTGCTTGTTAATGGT |
| 75 | | | TGCATCTTTGGAGAG |
| MI02 | 2 | 68923211 | GCCTACCTGCGCGGGCGATTACTGGTGTACGTGTA[C/T]ACATATCCCAATGGGACGG |
| 76 | | | GCCTGCTGGGTGGCCT |
| MI02 | 2 | 71991688 | CGCACAGTACTTGTACTAGCTGCTATCAGGTCAGG[A/G]ACTCTCAGGACTGAAACCA |
| 77 | | | CAGTGCAGGGAACCCA |
| MI02 | 2 | 78860220 | GGATGTAGCTGCGGCGACAGCACGGCCCACGATTT[A/C]TCTTCCTTCACCAGTGACT |
| 78 | | | CTGCTGCTGAGCTGGT |
| MI02 | 2 | 80044237 | TGGTGACCTGCTAGGCCTAATGAAACCCTTAGCCA[A/G]CAGATCGTCCAATTGTCGC |
| 79 | | | TTCAATTCCACCTGCT |
| MI02 | 2 | 81348249 | CGCCGTTCGAAGTCCCACCGCAGAGGGGGTTGTGG[C/T]AGCAGGGTCTGTGTTCAG |
| 80 | | | CCAATCGGTGCGACCTA |
| MI02 | 2 | 85197765 | TGTAAACATGCTCCAGCGAGGTGTTCCATCTGGTC[A/G]TGCAATACCACATTCCGGAT |
| 81 | | | TGTCAAGATAGTATA |
| MI02 | 2 | 87532481 | TATTCAGTGTAATGCCCATCATATTGAAACAGCCC[A/G]GAGTATTCTGCCTTGCAATG |
| 82 | | | TGATATCCTTCCCGT |
| MI02 | 2 | 88349291 | TGCAATGGATGAGGAATTGAGGTAGGGAAGAAAAG[G/T]TAACACCTAGGTCTAGTTT |
| 83 | | | GGGAACCACAAAACTG |
| MI02 | 2 | 88797128 | ACAAAAGAGAAGCTATACGGGTTGAATTAGCTCTC[G/T]TGCTATTAGCAGGCTTTTTT |
| 84 | | | AGAGAAGTACTACAT |
| MI02 | 2 | 89435062 | TTCAAGTTCTGCAGCCTCTTTAGCTTTCTTAGCTT[C/T]TTCCTTAGCCCAATGAGCTTG |
| 85 | | | AGAAAAACGTAAGA |
| MI02 | 2 | 89844641 | ACATGGATGGGAATGATATTCCAAGATCCTGGAAC[A/G]CAGACAAACTTCAGAGATA |
| 86 | | | CTATGTGTAATAGCTA |
| MI02 | 2 | 89855448 | CTGCTTTGTATACGAAGTCCTTCGGCGCCAAGGTT[A/G]TCTGCTTCGATACACACATT |
| 87 | | | CACAACGCTCGTACG |
| MI02 | 2 | 92149836 | CTCCTGCAGCATAGCCTTCGTATGAGTCAGTACCA[A/G]CTCCAGCTTCTACCGCAGAT |
| 88 | | | CCTGGATCCGAGACT |
| MI02 | 2 | 10398590 | CGACCGTCAATGGTGGCAGCGGGGTCTCACTCTCG[C/T]CTCGCCTCTCTGGTGCTCA |
| 89 | | 7 | ATAATGGCATCCCCGC |
| MI02 | 2 | 10634867 | AGCCTATCAACAAGTTTACACCTTGCCCTCATTTC[A/G]AAGCAGCATTAGGTGGGGG |
| 90 | | 9 | CCTCATCGCTTGCACT |
| MI02 | 2 | 10646199 | CTGTCTTTGCCCATTCTGCTGGCCCAATGGACGCC[A/G]AAGATTGGCTACAAACTGC |
| 91 | | 0 | GGAACGTGAGTTGCAC |
| MI02 | 2 | 10677322 | TTTAATGCGAAATAAATCCAAGACTCGGATCTACT[G/T]TTGAGAGGACCGCGGGTTG |
| 92 | | 8 | ATTTCAATGTTTGGCG |
| MI02 | 2 | 10824884 | TTGGCTAGCGCACAACTCGGCCTGAACGGTTTCAA[C/T]GGCATTGACGAATTGCTCG |
| 93 | | 7 | GGGAAATCCCAAGAAT |
| MI02 | 2 | 10983025 | TCGGGACGACATTCTCCAACAAGCAAAGAAAGCGG[C/T]CCACCGATTGCCCCATGC |
| 94 | | 4 | TCTCCCTCAACATCTGG |
| MI02 | 2 | 10996852 | AAAGAGGGAAAAGAAAGACAGAAAGCAAGGTCAGT[C/T]CCTCTAAATTCACGGCA |
| 95 | | 4 | GCAACAGAGTGATCGTGC |
| MI02 | 2 | 11050867 | TGAAACACGTAGGCTGTTTCAAATTTTTGGGAATC[A/G]GATATCAGCATTCTAATGCG |
| 96 | | 9 | GGTTAAGATTTTTTT |
| MI02 | 2 | 11079496 | CACCGCAACCATGCTACTGATCCCACGTCGTTGTC[A/G]CTTACACACGCTAGGTTTTT |
| 97 | | 8 | TTTCTTTTTCCTAGT |
| MI02 | 2 | 12027466 | AATTCAACCACCCCTACGCGTACCAGGAAAGATAG[C/T]GAATGGAATTAGATCATCC |
| 98 | | 5 | GGATGCAATTTGTTAC |
| MI02 | 2 | 12254049 | CGAGTATGGGCTCGTAGGTAGTCGTGGAGTAAGTA[C/T]GAAGGAAGTGCTTGCCATT |
| 99 | | 4 | TTCTTGTGGGCATACG |
| MI03 | 2 | 12307914 | ATAGAGGAGGGGTAGCGCCGTCGTGGGTGGAATCA[G/T]GGAGCACCGCCATTTGAG |
| 00 | | 2 | CTCGAACCCATGGACAG |
| MI03 | 2 | 12551151 | GTCCATGGCGGCTCTCCCTCGGCGTACGCAGAACA[C/G]TGGCTGGCTCTTAGCTTCC |
| 01 | | 1 | TTGTGTTCTATAGAGG |
| MI03 | 2 | 12622529 | GGCCCCACATGTATGCGAGAACGTGGTTGAAAGCG[A/G]TCGGAATGATGTGGCTGG |
| 02 | | 6 | CATGTGGGCCCTCGATG |
| MI03 | 2 | 12838605 | CAGGATTAGGAAACGATTTGTTCTTACCATACTTT[A/G]CAAAAGAAGAGAATAATTTT |
| 03 | | 1 | CCTTTCAAATGTGCC |
| MI03 | 2 | 13203583 | TCAATATCTATCTATAACCTATTAAAACATGGATG[C/T]TAGCCTTTTAGAACAACAGTT |
| 04 | | 1 | AAAAGCTATCAAAT |
| MI03 | 2 | 13253975 | AGTACATGAAGGATTTTATGGTACTTATCAATTGG[C/T]CCCAAAGATGAAGTGGCTTT |
| 05 | | 9 | TGAGGAGAGCTGGCT |
| MI03 | 2 | 13271971 | TTTTCTTCTGCATCTGATGCACGAAGAGATAGGAA[C/T]GATAGGAATGTGAGCGATTT |
| 06 | | 1 | ATAGAGGTATTAGTT |
| MI03 | 2 | 13602965 | CAACCATGGAAGCCGAGCTTGCTGCACTTGACACG[A/G]CAAATGTTGAGACAAAAT |
| 07 | | 2 | GGTTGCGTGAACTCTTG |
| MI03 | 2 | 13640991 | AAATTTACGAGTGAAGAGTGTAGAGTATGCTTTCC[C/T]TATTTCAAAGCCATTTTTGA |
| 08 | | 0 | GAAGAAAATCCTTAA |
| MI03 | 2 | 13693596 | TCCATAAGCTTTGCTTATTACAACAAAATTCACCC[C/T]AGACTAGAGGCAAGGCTAA |
| 09 | | 4 | CAAAGTAGTTCAACAA |
| MI03 | 2 | 13725761 | CTTGAGCATAGCTGAGTGTTGTTTCAGATGTTTTT[G/T]AGCCAAGAGGCGTAGACTG |
| 10 | | 8 | TGACAACGACGATATT |
| MI03 | 2 | 13835069 | CTTCTTTGGCCCGCTGCCCCTTGTCAGCACTACTC[C/T]AACTACGCTGCCTGATGCAC |
| 11 | | 8 | ATGCACCAAGTGAGT |
| MI03 | 2 | 14150048 | AAGTTCAATTCAGCATAGTCATTTTTGGAAACACA[A/G]CTATGAGTGAACCAAACTA |
| 12 | | 8 | TAATCAGACAAACTAA |
| MI03 | 2 | 14997259 | TTCCTCAGCCCAGCCCATGCCGCCCCTTTCGTCCC[C/T]GCTCCTGCTCCATTTTCCGC |
| 13 | | 1 | GCATCGCTTTCAGAA |
| MI03 | 2 | 15086513 | GATCCCTATCAGCTCATCAACATTCTAGGTGCTTT[C/T]CTATAGGTTATGGATTGTAAA |
| 14 | | 3 | TAAGAAGAAAAAAC |
| MI03 | 2 | 15354940 | CACATTACTTTTGTCTGAAGCTGGGGGTTCACCCA[A/C]ATTCGTAGCAAATATACAAT |
| 15 | | 0 | GTCCGATTATGATGC |
| MI03 | 2 | 15449121 | TCAGTTTCCCTAAAAACATGGTGAGTAAAATTAAA[G/T]TCATGCTTGTGTTAAAGTTT |
| 16 | | 5 | GGCAAGAAATTGAGT |
| MI03 | 2 | 15516481 | TGTTAAGAAGTTTTGGGCCTACTTCGGGCACCCAA[G/T]TCCAAGGTACCCAACATAT |
| 17 | | 4 | GTCGTATTCTAATTTA |
| MI03 | 2 | 15588080 | GCTACTGTCTCCGCCACCTACGTCAGCTTGCCCCT[G/T]CCTCAACGTCTATCAGCTGT |
| 18 | | 7 | CGGCCTCCAGTGCAT |
| MI03 | 2 | 15854726 | AAGCCCGTGGCTTACAAAGCGTGCGCAGGTGTTCG[A/G]CAGAACGCTTACACAAAG |
| 19 | | 5 | CTTGCCCCGACGTGGGC |
| MI03 | 2 | 16552702 | GTCGACTTGTACTTATGCTGGTGTGCTGCGTAGTA[C/T]AGGTACAGCATCATCCAGCA |
| 20 | | 3 | CGTCAGGTCAGTGTC |
| MI03 | 2 | 16918243 | TTTTTTAAAAAATTTCGAGTGACTGAAGCACTGGA[C/T]AAATTAGTTGTGTTCGGTTA |
| 21 | | 8 | CTGTGTAACATAGAT |
| MI03 | 2 | 17112869 | ACTTCTTATTAGCTACCCTTTTTTAGATGTTAGTT[A/G]ATTTCATCTTCCATAAAAGTA |
| 22 | | 3 | GTTGGCGATAGTAG |
| MI03 | 2 | 17238964 | TTGTCATTGGCGACCACAATTTTCGACATTAGAAA[A/G]GAATGTTTTTTTTGCTACAT |
| 23 | | 5 | CTCTTCCATAGAAGC |
| MI03 | 2 | 17289354 | CTCTATTAATAGCTGCAGCTTTACATTAAATCACC[A/G]GTATCAAGCCACCTACCCTTC |
| 24 | | 2 | TTGTATGAAGACGA |
| MI03 | 2 | 17414143 | TTTAGTGATCTCATATAGTCTTAGGGTGGAAAAGA[G/T]ATTTGAGCAAACTATAGGAT |
| 25 | | 5 | GAAATCCTAACTTGG |
| MI03 | 2 | 17415775 | TTCTATATATTTATATATTCTACAACAACATAGTG[G/T]TATTATATGTTTATAGTGTAC |
| 26 | | 6 | AACAACAGTAAGGC |
| MI03 | 2 | 17447504 | ATCTAATTAATGAAGAAGCAAGCCTCTAGACGACG[A/G]CCATGTCGCTGGGTTCTTC |
| 27 | | 1 | GCTGGCGCCGTTGGCG |
| MI03 | 2 | 17548419 | CGATAGATGATGTTGTCTTAAAAGCTACTTTGAAG[C/T]GTACAACTTCATTATTCGATA |
| 28 | | 1 | TCCCTCCCTACATA |
| MI03 | 2 | 17562425 | TCAAACTACATGATTGATATTAATAAAGCTTGAGC[A/G]GCTAAACTATGCCTGGATGT |
| 29 | | 1 | TGGGTGGGGGCAGGG |
| MI03 | 2 | 17700209 | GTTGCAGAAACGGTGGGTGGTGGGTGGATGCTTGT[C/G]GTAGCGGAGAATTGGAAG |
| 30 | | 3 | TTGATGTCCCTCCCTCA |
| MI03 | 2 | 17765851 | AGTAGACGAGGACAGTAATGTGGATGAGGAGGCAC[A/G]CCCGTGTAGGCGACGATA |
| 31 | | 8 | GCATCATGAGCCTGGTT |
| MI03 | 2 | 17852278 | AAGGAGCAATTGTCTCTATCAGGCAGACTGGCTTT[A/C]TTCGCCCTTTGCTTTTTCTG |
| 32 | | 2 | ATAGATAAAAGTTGG |
| MI03 | 2 | 17882320 | TATGTTTCCCATAATCACATGGCATTTGGAATTCC[A/G]GTTGTCTAATCCTCAGCTACC |
| 33 | | 1 | ACTCAGGAACACCC |
| MI03 | 2 | 17918909 | TTCTTTAAACGTGTCGTGTTCACCTTGTCGGGTCT[A/G]AAAAGGCTTGTATTGGGTCG |
| 34 | | 7 | AATTGATAAGTCTCG |
| MI03 | 2 | 17963325 | TTTCTAGATTCATGTCGTAGATAAACAATTAGCAG[A/G]GTTAGCTTTTAAATGAGTTAT |
| 35 | | 7 | GCTCATACTTAAAA |
| MI03 | 2 | 18048069 | TCCTTTCCGAGTTTTCATCAGTTTATTCAAAAGGT[G/T]GTACCATTGTCATACAACATA |
| 36 | | 8 | CATAGTTTGTTCAT |
| MI03 | 2 | 18131497 | GTATAGTGCGCACTTATGCAACTTAGCACAAGTAG[C/T]TCAGAGAAAACTCAAGAAT |
| 37 | | 5 | CATGTGGAAGCAACCC |
| MI03 | 2 | 18384684 | CACGACAGCAATCCGCGGCACATGCCGATCGACGC[C/T]CGCTGCTCCGTTCTACAAA |
| 38 | | 0 | TACACCTCAACCCACT |
| MI03 | 2 | 18622781 | TTGCAAAACTTATCGGCTGTTCATCGATGTCCCTT[G/T]GCTGGGTCCAGCCCTGGTGC |
| 39 | | 1 | ACACGATGCCTGGCT |
| MI03 | 2 | 18633994 | ATTGCGGCATTAAACAAGGGAAAGGAAAGGGCGGC[A/C]GGGTGGATCAGAGCACA |
| 40 | | 8 | ACTCCCGAGGGCAGAGCT |
| MI03 | 2 | 18708550 | CCCTCGTCTTGCTCGTCGGCGTCGCCGATGCCCTG[C/T]CCGGTGAACCTTCCATCATC |
| 41 | | 5 | ACTTCCGCCACTGCT |
| MI03 | 2 | 18880291 | TCCACCAACAACCAGCCACAATTCATTCAGATTTC[A/G]AACAGAACAATTGTCTAGA |
| 42 | | 5 | CTTACTATTTAGAAAC |
| MI03 | 2 | 18973166 | ACCCCCTTTTTCTTACTGCCATGTGCACCCTAAGA[C/T]CCCTCTTTGTTTTTAACCAG |
| 43 | | 7 | CAGTCCAGCAGGCCT |
| MI03 | 2 | 19067421 | AAACAAGTTTCTTGCAAAAGAAGCCCTAGTTCGCG[A/G]CCTATCTTTTGGGGTTTATT |
| 44 | | 2 | GATCTGGTGGAGGAA |
| MI03 | 2 | 19158691 | ATGCTACAGTTGTACATAAGTCTGCATGACCGTTT[A/G]AACTTTGAAGGTTTCACTAA |
| 45 | | 8 | TATGCATGGTAGCTA |
| MI03 | 2 | 19324631 | AGAGAGCTTGGCAAACCAACGAGCCTTGGCTCTCA[A/G]CCGTAGGCGTCACTTGAC |
| 46 | | 1 | CCTGTCCCTTTCCTGAC |
| MI03 | 2 | 19424701 | TTGAACATTTTTGGATTTCAAACGATTCAAGAAGG[C/T]TAGTTGGTGTGGCGCATACG |
| 47 | | 7 | TGGACCAATCAGAAT |
| MI03 | 2 | 20379484 | GATTCATGGGACGAAGTAATGACACTAGAGGACAC[A/G]AAAGGTATGGAGTTTTCGT |
| 48 | | 1 | ATCCTGCAGTGATCCA |
| MI03 | 2 | 20392715 | TGAGCCATATAGTGTTATGTTATCAGTCTTCTATG[C/T]TGGGATCTTGATAAGGCTGGT |
| 49 | | 4 | GAGTAACTTGTTGC |
| MI03 | 2 | 20512254 | CGGGTCTAAATGTCTAATGACTCGTGTTATTCAAC[A/G]ATTTAGGATTAAATTTTAGAG |
| 50 | | 3 | TGTAATCGACACTC |
| MI03 | 2 | 20553855 | CTCGATGGTGAAAGCATTACGAAGAGGCAGTACTA[C/T]TGTCAATGTATTACAGTTG |
| 51 | | 1 | ATTGCAATGTTTATTC |
| MI03 | 2 | 20558254 | TTTAAACGAACAAGAATGTTGCCAGGGTGCATATC[C/T]GCATGAATAAAATTGTCCTC |
| 52 | | 4 | CTACAGAATCGGGAG |
| MI03 | 2 | 20569623 | TGGAAGACGTTGGTGTGGACACGCCGGAGCCGACG[C/T]TGTTGTGGTTGTTACCGC |
| 53 | | 0 | TGCTCGTCACCGTGCTG |
| MI03 | 2 | 20569820 | AAATCTCTGATTATTTTCATGTCTTTTTGCTGCTT[G/T]GATATGTTCCGTCATCTTCTT |
| 54 | | 4 | CTTCTTTTTTGAAA |
| MI03 | 2 | 20688500 | CTCCCATCAGATATTGTGACGGTAGGGTTGAGGGT[A/G]GTGGACATCGAGGGGCAGA |
| 55 | | 2 | AGAGAAGATCAGTCGA |
| MI03 | 2 | 20992834 | GACCGCGCGCTTCGCGACTCTGGTTTCCTCCTCGT[A/G]TTCCACTGTCTTACGGGAC |
| 56 | | 1 | CCACATCACTCTAGAC |
| MI03 | 2 | 21050249 | TTCACTCTTCGAGCACCACTAATTAACGAAAATCG[A/G]TTCTTTAATATAGTCAAATC |
| 57 | | 2 | TACTTCCCAAATGCC |
| MI03 | 2 | 21150007 | TGATAGCTAGCCTAGGTGAAAATTTAGCTGGACGA[A/G]CCAGCGTTAGGATGATTCA |
| 58 | | 0 | TTAGAAGTTACTCGGT |
| MI03 | 2 | 21189704 | TCTCGGCCCATCTTACAACATGGAATGGGCCTGCT[A/G]CAATTCGGATAGTTGACGA |
| 59 | | 3 | GTCCAAAACAAACATG |
| MI03 | 2 | 21251396 | CACAACAGCTATACGCATAGAGACATCGCCACGTC[A/G]TTGGAATTTATGTAATCCGT |
| 60 | | 3 | CTGATGGAGGATCGT |
| MI03 | 2 | 21465758 | GCGGCGACATCTCCGGTTGGTGCCCGCTCCTTACC[C/T]CCTGTTCATGTTAACAGTAT |
| 61 | | 7 | TCGGTTCAGTTGGTT |
| MI03 | 2 | 21590669 | ACTTATTCTATTGGTGTTTCGTTTGACCTCAATTT[A/G]CAAAAGATGGCTCATAATTGG |
| 62 | | 9 | GTATGTTAGTATCT |
| MI03 | 2 | 21598457 | GCTCTCCATTGTAGAATCAGGTCCTGCAACAATCG[A/G]GGCAGCCACAAACACTGG |
| 63 | | 8 | ATCGTAGCCGTACAAAG |
| MI03 | 2 | 21669496 | TGTTAGTAGTGTGGTTGGAGGCGCTGGAGTCGACC[A/G]CCCAGTCGGTAACCACATC |
| 64 | | 9 | GGGTGGATTCAAAGCC |
| MI03 | 2 | 21776276 | AAGTGGATATTGCATGCAACAAATATATAACTCTA[C/T]CCAAGCCTCAGTAATTGCAC |
| 65 | | 1 | TTCTTATCACAGAAG |
| MI03 | 2 | 21913158 | GAATGGCAATGGCTGGAATTCCCGAGGCGACTCTC[C/T]TTCCGCTTCCAATACCTGT |
| 66 | | 6 | GTCAAGCGGTTTAAAG |
| MI03 | 2 | 21995284 | AGCAACTTGATTTAGTTTTAAGCAGTTCAATAAAA[G/T]AAGTTCACAACTAAAGACA |
| 67 | | 8 | ACACTAGGCATATAGT |
| MI03 | 2 | 22022380 | TTTTCCAATTGGTGCTAGTCCTAGCTTATCATATA[C/T]ATATCATGCGTTCCGAACTTG |
| 68 | | 8 | ATACCTTCTTATAT |
| MI03 | 2 | 22099392 | TGTTGCTTTGTTACTGCCTTTGTTTGAAACTACTC[G/T]GGATAAAGTCATGGAAATGT |
| 69 | | 1 | TTGTATCAACGTGCC |
| MI03 | 2 | 22203639 | TTCCTTCATGTGTCTGCCTGCCTCTCCCGGGTCCC[A/G]GCCCGATAAGGACGGCGGA |
| 70 | | 2 | GCCTTCATGCGTCTGA |
| MI03 | 2 | 22245084 | TCCTTCAGGTGATCCATCATTAAATGACAGAGAAT[C/T]CCTTGTCTGAGTTTGACATT |
| 71 | | 5 | GTTGTACTTTTTTGA |
| MI03 | 2 | 22369724 | GTCTCTGGTCTGTTGATCTGGAATCCAACGGTGGA[G/T]TGTGCTACCGGTTCGGTCT |
| 72 | | 4 | CTAATCTGAGTCGTGG |
| MI03 | 2 | 22480093 | ATATTTGGACATAGGAGGAAAATTTGGGTTTCTAC[C/T]AGAAGCACCAGGCCGGTCC |
| 73 | | 2 | AAGGGCACATCGGACT |
| MI03 | 2 | 22526485 | TTCTGTAATAGTTTAGCAATGCTCGTTTCTAAGGT[C/T]TAGGAAATCCATGTCAATTTA |
| 74 | | 1 | TTTTTAAGGTCTTA |
| MI03 | 2 | 22589832 | TAAAGGAGGGCCCATCCTTGCTTTCCTTTCAGCAG[C/T]GATGAGGAGGCGATGGCCA |
| 75 | | 8 | CATACATACCTCTTGT |
| MI03 | 2 | 22878858 | ACATATCACATAAAGAACAACTAGCTCTTTGATTG[C/T]GTTATATTGATAAACTTGGA |
| 76 | | 3 | AGGCCATGTGAGCAC |
| MI03 | 2 | 23034913 | AAATGCAGGCTTGCTTTATTGGAGATCCAGGACTT[A/G]TTGCTATTGGGGAAGGATG |
| 77 | | 8 | CAAGCTGCTTAGGAAA |
| MI03 | 2 | 23102767 | GGTTTCCGGTTGATCTCATGCATCCACAGATACCT[G/T]GCATCGCCAGACATGAGCGC |
| 78 | | 2 | AAGGGAGCCCGGGTT |
| MI03 | 2 | 23153733 | TCATCGGGGTTGATGCTGTTGCAAAGCTCCTTCCC[A/G]TCAAAGAGCTCCTGAAGAA |
| 79 | | 6 | GCTGCTGGATCTTTGG |
| MI03 | 2 | 23160422 | GCCCAGAACGACTCAGCATTGGGAGATTTGGCTGA[A/G]CACTCACAGTTCGGGAGC |
| 80 | | 4 | AGCAATTCCCTACCAGA |
| MI03 | 2 | 23313988 | ACCACAGTGATAGAAATCAACGCTGAAGTCTACGT[A/G]CGTCCAGGGACCGTCCAC |
| 81 | | 3 | ACATGAAATGAAAGGAA |
| MI03 | 2 | 23317005 | CTCACAAATCTCGACCAGAACAAAGAAACATGACC[C/T]GGATCAAGCTAGAGGATT |
| 82 | | 3 | ACTCGCCAACAAGTCAA |
| MI03 | 2 | 23426584 | ATTTTTTTAATCATCATCGTCGTGGAAGCTTATCT[A/G]TTCGCTTCGGATTCAAGTCGG |
| 83 | | 8 | GTGTTTGAACTGGT |
| MI03 | 2 | 23458550 | AATGCGTCATAACTTGGCCAATCATACTTCAGATA[A/G]TAATACTAGATGAAATTGAG |
| 84 | | 3 | AGCTGTATTACCTTA |
| MI03 | 2 | 23468381 | TGTTTTATTATGACCATATGATGTTTATCCTTTTA[A/G]TTTTTATCTTTTAGCATAATA |
| 85 | | 8 | GCATGTTAAGGTCC |
| MI03 | 2 | 23487931 | TCCTTACTATGTTGCCCCTGAGGTTCTGAAAAAAC[A/G]CTATGGCTGTGAGGTTGATG |
| 86 | | 3 | TGTGGAGTGCCGGTG |
| MI03 | 2 | 23520736 | GCAGCTCAATACCTGCTCACAGAAAAGTTTTGGTC[A/G]TCTGCAGGTATCATCGCCA |
| 87 | | 8 | GGCGCAGAGAGGCTTC |
| MI03 | 2 | 23707655 | CCCGGTCAGTGGTGTAAAAGCACTTCTGGTCGTCT[A/G]CCACCACGAGACAACAAC |
| 88 | | 2 | AACAGCAACAACAAAAA |
| MI03 | 2 | 23769656 | ATGGATTCAACAGTAATTATGATAGATGGTAACAA[A/C]AAACGTTGGCCACCCCTTAA |
| 89 | | 6 | ATTTTAAACATATGT |
| MI03 | 2 | 23779477 | CCCACAATATTTAAAGCCAACCACATGTCAAGATG[C/T]CCTAGCTATTTACTTTGTAG |
| 90 | | 2 | GCCAGGAGTCCAGGG |
| MI03 | 3 | 3921002 | AGATGGTAACTAGCGTGTGGACTTGGGCTCGTGCG[G/T]AAAGTGGGGCCCGGCAAA |
| 91 | | | GGCCCACTCCCCCGTCT |
| MI03 | 3 | 4154238 | ATTATTTTGATGCTATAGTTGCTTGTATTTTTTTC[A/G]ATAAGGTTGAAGAAATATTAT |
| 92 | | | CACAAAATGGCAAA |
| MI03 | 3 | 4194871 | CCATCCTTCGTGTACCCACAGCCACCCAATCGCAC[A/C]GCCTAAAGCAAAACACGTT |
| 93 | | | TAATGACGGCGTAGAT |
| MI03 | 3 | 6527555 | GGACTTGAAGGAGCTACGCTTGCGCTTCTGATTAG[C/T]CTCAGACGCAAGTGCTCTT |
| 94 | | | GTAGTCTTCACTTCTC |
| MI03 | 3 | 7684608 | TTAAAAAAAACATGGTTAAAATTCGAAGTAAAATG[C/T]AAAAAGTTTATAGATTGTAC |
| 95 | | | TGATAAGGCATCAAA |
| MI03 | 3 | 7775664 | TCTTCACGCAAAGTGCAAAAACTTTAACCCTAAGG[C/T]AACATGAACAGGTTGTGTG |
| 96 | | | TGTGCTGAAGAAAGAG |
| MI03 | 3 | 8606955 | CCCCTGTCGAAAACAGAGATTTCCACGTCAGCCTC[A/C]AGCAAAATGAAGTGGTTTT |
| 97 | | | CCTTCTATAATTACGT |
| MI03 | 3 | 9042692 | CACATTAACTTAGCCTATAGCGGCGACTGAGGTGC[A/G]GCTTGGTTAGGAAGCCAGT |
| 98 | | | TTTAGTTTTCTTTTGG |
| MI03 | 3 | 9909516 | GTCTATAGTTATTTTCCTTTTGTCATGAACTAATG[A/G]ATTGTGAGGCATTAGATAATC |
| 99 | | | TAGTTGTATTGGAG |
| MI04 | 3 | 9950901 | GGACATCCTTACAAGAGGACCCAACAAGGACTAAG[A/G]AAAGCACAAACTTTTTGA |
| 00 | | | CACCGCAACAAAAATCT |
| MI04 | 3 | 10184005 | TGACAATACCTATGAGTAAGTCAATACTGTAAAGC[A/G]ATAATTTTTCAAAAGCAGTA |
| 01 | | | ATATAGTATTTCGTG |
| MI04 | 3 | 10452903 | TAGAATATTGGAGTGAGAACAAAAAGGTTGTTTTG[G/T]TTTACAAGAACGTGTCATG |
| 02 | | | TTTCTACTCGAAAACC |
| MI04 | 3 | 12037442 | AGCTCTTGCTTGTAGAACTCACGCTTGTCAATTGA[C/G]GCGTGATAGATCTCGACCTG |
| 03 | | | GACAGAAGCTCAGTT |
| MI04 | 3 | 12321178 | AGAGTTATATCCTTGTATGGATTGTGGATCCTACC[C/T]ATTAGAGATCCTAATACTCCT |
| 04 | | | ATCTTGTTATAGTT |
| MI04 | 3 | 13470034 | GATGGACTGTAAATTTGTTCGTCACTCTTGCTGTT[A/C]TTTTCGTTCAGCTGCATGCA |
| 05 | | | CATGAGCTCATTGCA |
| MI04 | 3 | 13869033 | AGATCTTTGTCCGTGGTAACATTTAATACTCCATG[C/T]TGTACATTTAATACTAGATCA |
| 06 | | | CTAGGCCCACCTGT |
| MI04 | 3 | 13881769 | TGCCTGCTTGCTACGGTTTCAGAATGCTTTCTTTG[G/T]CATTTCGTAGCAGAAAACAG |
| 07 | | | TGCGCCACCTGAGCG |
| MI04 | 3 | 14418494 | AGAAGTAGCGAGCATCCAAGGAGTACGAGAAGGTG[A/G]ATCTGTGTGAGGAGATTC |
| 08 | | | AGAGCTGCTTCCATGGT |
| MI04 | 3 | 17438691 | ACTAGATTCTACAGGGGATGTCGAAAACTTGAACA[C/T]GTTCCGGCATCCATCACGC |
| 09 | | | AAACCAGTCCACCGAT |
| MI04 | 3 | 17805407 | ATAAGTAGTAAGAGCACATACGGTATTACACCATG[C/T]TGGCCTAAACTTGTGCCTAG |
| 10 | | | GTTCAATACGATGGT |
| MI04 | 3 | 18193032 | ATTTAATCAGAAGTTCGCAGCGTGTCATTTGAAAG[A/G]TAAACTGGCATGGACTGTG |
| 11 | | | CATGACCGAAGCTGTT |
| MI04 | 3 | 18810450 | GTCGACGTGCCATCGGTTCGGGAGAGCAGCATCTT[C/T]GTAGTCTATGCCCCCCGTG |
| 12 | | | TCCCTGCACGGGGTAG |
| MI04 | 3 | 19562535 | TCAATTGTACGCATGGAAATGAAATATGGTATCAT[A/G]CAGGTTTGGGGAGTGGTATT |
| 13 | | | TGTTAGCAACTCATA |
| MI04 | 3 | 22161510 | TTGCATCTCTGTATCGAGTATCAACAAAGAGCTAA[C/T]AGCCACCAGCCCATTACATC |
| 14 | | | TTTAATTTCTGAACG |
| MI04 | 3 | 23212790 | GAGGAGAGAGAAAGGGACGGCTGTTCGCAGAGCAC[A/G]CAGATGAACTGATAGAG |
| 15 | | | AACTTTCAGGTTTTCCAC |
| MI04 | 3 | 23848846 | ACAATCTACTTTGCATGGCATGTACTGTACGTTTT[A/G]GCCACCTTCTTGTTGCTCAG |
| 16 | | | AGTTGACTTGACCTA |
| MI04 | 3 | 28924037 | CTGCAGGAAATAAGCAAAGAACAAAAAAAATGTGT[C/G]ATCATCCCTACTGAAAAT |
| 17 | | | GTCAGATGGTCTCGCCT |
| MI04 | 3 | 30049902 | AGAGTTACGCACTCAGAAAAGAACATGCCATATGC[A/G]ACATTTCCACAAGCATGCA |
| 18 | | | TGACACTACCGCAAAA |
| MI04 | 3 | 31489331 | TCCATGGGATGGGATCAATACAAAATCACTGAACT[A/G]ATCGATTGCTTGAGACTGTA |
| 19 | | | CTGTCTGCATATTCC |
| MI04 | 3 | 32244563 | GAGACCAATGAAGCATCAGACAAATTTGGGTCCCT[A/G]ATCTCTATTTTCCAAATCAT |
| 20 | | | AATGACAGATTCCTT |
| MI04 | 3 | 35028048 | ATGCATATCATTCACAGTCACAGCGCGCTCTATAT[G/T]TCTCTGCTCTCTCTACCAGTG |
| 21 | | | CAGCGCATGGCAGA |
| MI04 | 3 | 35077416 | TGGTATGTCATTTGTATAAAAAATGAAGCTATTAC[C/G]CTGCATAAATATGCATTTCAC |
| 22 | | | TTATTATGGGCATG |
| MI04 | 3 | 35747767 | AATGACGAAGCTGTTTCTCTCTCCCTTCGTTTACC[A/G]AAGCTTTCAGTCGACGCTTG |
| 23 | | | CCTTTGTTCCTGAAA |
| MI04 | 3 | 35748583 | GTGCTGCTTCGTTCCAACGAAAACGCAACATGAAA[A/G]CAATGCAACTTTCACCAG |
| 24 | | | GATGTTTTATCATTTCC |
| MI04 | 3 | 36318636 | AGCAACGTGTGGTTAGCAACACAATTTTGCCCTTA[C/T]CACATCTCAACAAAACCCC |
| 25 | | | AAATACACATAGTTAC |
| MI04 | 3 | 36947375 | CCCCTTACATATGCTTCAAATTGGCAAATGGGAAG[A/G]TCACCCGCAGTTCCTGGATC |
| 26 | | | ATATATAGCAGGCTC |
| MI04 | 3 | 38438567 | CAGATTAGCGCATGCCATAACTGCTGTGACAGTAA[C/T]AGTCTCGTGACACGTAACT |
| 27 | | | AGCTAGTACTATTACC |
| MI04 | 3 | 40929565 | TGAGCATGATGTCGGCGACGTAGAGGAGGTAGACG[A/G]TGTTGTTGCTGTGCCGAA |
| 28 | | | GGATGAGCAGGGACATG |
| MI04 | 3 | 42552560 | TAATTCCGCCTAATCAAGCCACATGTCCCAGATAA[A/G]GTACTGTCGGCGTTTCGAGA |
| 29 | | | CCGGGGGTCCCTGGG |
| MI04 | 3 | 42890120 | GAGACACGGAATCATGAAGCAAATATTAGGCGATA[A/G]ATATAAAAGCATATTACACC |
| 30 | | | GTATCGGAGGAACGA |
| MI04 | 3 | 44264231 | CTAATCTACGCCTTGTTCACCCTTTGCTCCTCCTA[C/T]CAAAACTCCCAACTCCAACC |
| 31 | | | AATTAGCAAAAACAA |
| MI04 | 3 | 47071994 | TGGAGCCCATCAGCTTAGATATGAATCCATGCAAC[A/C]GTGCATCTTATACAGGTTAA |
| 32 | | | TAATGGAACTCTAGG |
| MI04 | 3 | 49500370 | TTTACAGTTCCATTAACTTTTTTATACTTGATTTT[C/T]GCAAATACAACATCATTATAG |
| 33 | | | AGATAACAATCATT |
| MI04 | 3 | 50563756 | GCAAATCATCTCCAGCGGCACTCTCCTCGCCTCCC[C/T]AGATCTCGGTTCTCCATCAA |
| 34 | | | GATGTGATGACTTGC |
| MI04 | 3 | 51765091 | ACTAAATGTACAAAACTACAAACGTCATTGATACA[A/G]ACAATAAACACTACTATTCT |
| 35 | | | TGGGATTCATGCGCC |
| MI04 | 3 | 55108926 | CACTTAAGCAAGGATTCACCTCTCTGACTTGAATC[C/T]TACAAGCTTCTCATACAACT |
| 36 | | | TGAACTATTAGAGGA |
| MI04 | 3 | 55959796 | AGGCTTAATCCGTGGCTTAAATAGCGGATGAGAGG[A/G]TGAGCTGAGCAGATGTCGT |
| 37 | | | GGGAGATGAAATGCAA |
| MI04 | 3 | 57545518 | CTATAGCCTCATAAACTTGTCCACATGCTTTAACT[A/G]GGATAGCTGTAGGGATGGAT |
| 38 | | | AATTGGATCTCTTCA |
| MI04 | 3 | 59555371 | CAAGCTCACACAGACTGAATCACATACTCAATACA[A/G]CTTACACACAGTGGAGGTA |
| 39 | | | GGGTATTACGCTCCGG |
| MI04 | 3 | 60878936 | GATGGAATCATTTGTTACAAACATCGTATTGTGAT[C/T]GCAGCTTGGTCCGAATTTCCT |
| 40 | | | CAGAAAATTTTTCG |
| MI04 | 3 | 64815690 | TCCTAGGTGTTTTCGTAAGATTCTTGCGCTGGAGT[A/G]GTGCTAATCATCATGCTCAG |
| 41 | | | CTCTCCAGGTCCAGC |
| MI04 | 3 | 64821150 | CTGACCCACGCTCAGAATCCATCCATTTCTATCCC[A/C]CACACACAAATACACATCCC |
| 42 | | | CCTTCCCTTCCCCGC |
| MI04 | 3 | 66658033 | TTCTCCAAATCGCCCAGTTTTTGTGTCTTCACTCC[A/C]TGTGTATGTATTTATTCACAT |
| 43 | | | TTCATATACTTATG |
| MI04 | 3 | 67259018 | TTCTCTCCTCGTTTACTGTGTCATCGCAACCCACT[C/T]CCACCGACTATGTTGCTAAC |
| 44 | | | TCTTCCTCATACCCC |
| MI04 | 3 | 75808466 | GCCCATGCGCGTGACAATGGCGGAGGAGCTGGCGC[C/T]GGTGGGGTCCGCCTGTAA |
| 45 | | | TTCATGGAAAAGGCTGC |
| MI04 | 3 | 77851903 | GTTCCCTTGACTCCGAGACTATTGGATTCAGGACG[A/G]ACGACATCATCGAGGCGGC |
| 46 | | | AGCTTTGAAGACCCTA |
| MI04 | 3 | 82739532 | ATTGGAAACATTAACTGAATTTTAGTGTTGATAGC[A/C]GTTTTGGAGCTGATTTGTGG |
| 47 | | | CTGTTCTATAATGTT |
| MI04 | 3 | 85891476 | TTAAGGCTTTCTACACTTTGAATTGCTGAGAGGCA[C/T]GAGAATGAACATACACTCC |
| 48 | | | GATCCGTGTTATAAGA |
| MI04 | 3 | 86929806 | GTCTAGATGACTCAATTGAATAAGGTTCCATTCCA[C/T]CGCCTAGACCGTGGTGGTGA |
| 49 | | | CGAAGAATGACGTCT |
| MI04 | 3 | 86945299 | AAAAGTGGACCCACGCTCAATGTGTGATGACCATC[A/G]CAAACGGGGTTAGTCCCTA |
| 50 | | | AACTGCGCAAACATCA |
| MI04 | 3 | 89380527 | CCCTTCCTGACGTCTCTAGTGATCCTCTTTCTAAA[G/T]CCCCTCAGCCACCCAAAAAG |
| 51 | | | AAAGCCTCCTCCCAC |
| MI04 | 3 | 91465356 | ACAGTTTATGAAGATGAAGTAAGAACTGATCAATT[G/T]GAAAAAAAAGATCGAAGC |
| 52 | | | AATTCAAAAACAACTAA |
| MI04 | 3 | 92064494 | TACCACAGGTTGTTTGGCCGAAGTTGGAGCTGTGA[C/T]GACTCATAGAGCAAAGAA |
| 53 | | | GATCAGTTTTTCTCAGG |
| MI04 | 3 | 93203422 | TGCCTATGTCCTAAACTACTTATATTTGCAATCAG[A/G]GGGAGTATTTAAACATGTGTT |
| 54 | | | TGGTTTCGGAACGA |
| MI04 | 3 | 94583387 | TTTTATCATTTTAAATCCCAAAATTTGATACCTGA[C/T]AGAGGTACATCTTGTCCGATG |
| 55 | | | TTGAACCCATCACG |
| MI04 | 3 | 10089926 | ATCAAAACCAGCAGCAAATCTTCGGCCACGGCCGC[C/T]ACCACGGCCACCACAATG |
| 56 | | 0 | GTGATCATCATCCTCAT |
| MI04 | 3 | 10360649 | GGACTCCGCTCCTACACCATGGTCACGTTAGAAAC[A/G]CAGACTTTGTAATAAAAAA |
| 57 | | 4 | AACTCACTAGCAGGAC |
| MI04 | 3 | 10684041 | CTCGATCGACCAAGTATGTTGGTCTAAGGCCCGAC[A/G]CAGCAAGGTGTCGAGAGC |
| 58 | | 5 | ATCATGGAAATGACAAC |
| MI04 | 3 | 10733621 | GCTTACTTTACAGTTGATAACTAGATGGACCTTCT[G/T]CCGCCCAATGTGCTAATTTG |
| 59 | | 0 | ATATGTTCTTGTTTC |
| MI04 | 3 | 11224679 | ATGATACAAACCTGAAAAGTTTCGCATAAATACCC[C/T]CCTCGTAAGATAAAACTTTA |
| 60 | | 0 | TGAGCTATTGTTGGG |
| MI04 | 3 | 11349117 | CTTTGTTGTTGACAGAGAGGTAGCATCAACAGCAC[C/T]AACTCTAACTCTCTGAGAA |
| 61 | | 0 | GAGAAGTCCCAAGTTC |
| MI04 | 3 | 11432404 | TGGGTTTTTGATGAGCTCAACAACCCTGAAGGCAC[C/T]GGATACTACTGAACTAAGA |
| 62 | | 7 | TATTCTTGCATCAAAT |
| MI04 | 3 | 11437492 | CACTCAAACTAGAAGTGAGTTCAACTTAGAAGCCA[C/G]ACTTGCTTCAAGACATGA |
| 63 | | 2 | AGCAAGTCAATGGCTGA |
| MI04 | 3 | 11489199 | ACAAAAATTCTCGAAGAGTGATACAAATTGAACTA[A/G]ATTGGGAAAATAAATAGGA |
| 64 | | 4 | ACCGAGCACATCGTTT |
| MI04 | 3 | 11620904 | AAAGGCAGGGCGCAACTGGAGGAGCAGATAAGAAG[C/T]AGCGCGCGCAGGGAGCT |
| 65 | | 8 | TCGAAGGCGGTGACTTGG |
| MI04 | 3 | 11638048 | TCGTCCACGTGCTTTGCGAATTTGGGACGGAAGTG[C/T]ACACGATGGTGAACAGATG |
| 66 | | 1 | AGTCGCCAGAACTCAT |
| MI04 | 3 | 11753794 | TTATGACTAACACCTAAGTATTTAGAAAGCAATAA[A/C]TTTATAACTGTAACTCCGAA |
| 67 | | 0 | TTTAGTGGTTCTCGA |
| MI04 | 3 | 11760405 | ACTTTTTTCAGTGACAAATGTTTTAAAGTCTTAAA[C/T]ATCGGATGTAGCTAAATGTA |
| 68 | | 5 | CACTATTAGCAACCA |
| MI04 | 3 | 11778843 | GAGAGAGAGATAGATAGATGTATAACCCCACACGC[A/C]CACACAGTAGTTCTCTGTT |
| 69 | | 9 | CTACCGTGCCGTCACC |
| MI04 | 3 | 11883623 | AATGAAGACTTTATTGATGACGGATCCTCCAATCA[C/T]AGAGTACAATGTTGCTCCGA |
| 70 | | 3 | TAGCTTTTGAGGCCT |
| MI04 | 3 | 12075991 | GTCATTTACACTTAGCAGCTTGGACAACACCTTCT[C/T]CTTGCGTCGCCTTCCTATGT |
| 71 | | 4 | CAACGTAACGAAGCT |
| MI04 | 3 | 12264596 | GGACGGGTGGGGGAGGTTATGCGAAGGCTTATGTC[A/G]CTTAAGAGTGAAATTCTTG |
| 72 | | 2 | ACCAGGATATTATGAT |
| MI04 | 3 | 12328348 | AGGGAGTGAATATACAGATCCGACAAATACTCACC[A/G]TCTTAGCATCAAGCGGTAT |
| 73 | | 2 | CACACGGAAGCCTGAG |
| MI04 | 3 | 12811979 | AGACAGAAAGATGATTGCATAGGGAGATACCAAGT[A/C]TTCCACTCTACTTATCTGTA |
| 74 | | 2 | GAGACATGCCATGTT |
| MI04 | 3 | 12883166 | TACCCCCTATGTAATGAGCTTGACCCAACTACCCT[G/T]TCTATATTAATACACTCCCAA |
| 75 | | 1 | CCCTAGTTAGGTTT |
| MI04 | 3 | 13116138 | TTCCCTCGTCGCCACCTCGCCGAGGCTGCATGTCT[A/G]CTGGTCAGGTCCTAGCTAG |
| 76 | | 0 | GGACAAGAAGGGACGG |
| MI04 | 3 | 13132677 | AAAATAGAATAGAATTAAAACAAGGGGTGCTGAGA[G/T]TTATCACGCATCATGCCAT |
| 77 | | 7 | GATCGCCAGTGTGTTC |
| MI04 | 3 | 13152975 | CCAAACTAATTAATGACAGCTAAACAATGATGCTA[C/G]TACTATGGCTCCTGCCATGG |
| 78 | | 7 | CCTATACTACAAAAA |
| MI04 | 3 | 13242327 | ACCACATAGAAACACTGATGGCTACTATATGATGA[C/T]GAACACACCGATGGTCATCT |
| 79 | | 0 | TTCAGAGTATCGCAC |
| MI04 | 3 | 13553332 | AATTATCATCGATGGAACGCAAACAAGGAGAGCAC[A/G]AGAAGACATCTGAGTTCC |
| 80 | | 6 | TGCAATCTAAATTGGAT |
| MI04 | 3 | 13572001 | AGATCGAGGCCGCCAATTGCACGCCATCGGGTATG[A/C]GTTGGGAATGAATGTCGCC |
| 81 | | 0 | GCTGTTTTTCGGCCAG |
| MI04 | 3 | 13572576 | CATAATTATTTCTTGAATTTAGTTTTTTTGTGGTA[A/T]TTTTCCTTCACCTCTTCCCCT |
| 82 | | 0 | CACGATATCTTTTG |
| MI04 | 3 | 13615343 | AAGTTGGAAGAATACGAAAGGAATCAAGCACTCAG[A/G]CAACCGAACTGGAAGCA |
| 83 | | 9 | AGGAAAGAGGATCGACGA |
| MI04 | 3 | 13658447 | GGCTGCCTAATCCCAAAACAATGGGCTAGAATCTC[C/T]TCTTTCATCGACTAAAAATA |
| 84 | | 8 | CTAAAGTGTCATTAT |
| MI04 | 3 | 13660949 | AGCGTTACGGCATCGTCTACGTGGACCGTAGCAAC[A/G]GCTGCAAGCGCCGCATGA |
| 85 | | 7 | AGCGCTCGGCCAAATGG |
| MI04 | 3 | 13737030 | GATACTAATTGGTCGAAGTTGGTATCAAACGGTTC[C/T]CCAGAGCGCGAGTCAGAAC |
| 86 | | 7 | AAGCCAACCGATCAAC |
| MI04 | 3 | 13976125 | TTAATAGCTAAAAGTGGTACAGAGTACAGACATAC[A/G]GCTTTCCACCCAGAATGAT |
| 87 | | 6 | TGTTTTAACAGCTTTT |
| MI04 | 3 | 14374478 | CCGAAGCCAAAGAAAAAATGGCCACAGTGCCGAAG[A/C]TAGGGGAAACAGTAGGG |
| 88 | | 3 | CTGCCAAAAATCTTGAGC |
| MI04 | 3 | 14463794 | GTGCACTCGTTTTCTTTCTTGCGGCTCAAGACACC[C/T]TTGATGTCCCTTTGTTTCGG |
| 89 | | 6 | TTTAAATCTAAATTT |
| MI04 | 3 | 14585673 | TAGGGATGGACGACGGCAAACCTCATGATCTGCAG[C/T]GGCATTGCTATTATTCCTTT |
| 90 | | 9 | TCAGGGAGCGAGACT |
| MI04 | 3 | 14606346 | GTCCGGTGATATTTATAGCAGGCAACCAGCAAACT[C/T]AACAACTTCGGGATTTTCG |
| 91 | | 7 | GGAGGCAAGAGCACCA |
| MI04 | 3 | 14704949 | AGAAGGGGGAAGACAAGTATCCAAATACTAAAAGC[A/G]TAATAAGTTCAGAGCTTA |
| 92 | | 4 | GAAATCAATCACAAGAT |
| MI04 | 3 | 14778180 | TTACCATTTTACCCGAAGTTGCCATTTCTAGCCTC[C/T]TTTTCTCTTTTGGACTTAACA |
| 93 | | 5 | CCTTCAAATTGCAT |
| MI04 | 3 | 14888455 | CAAAACGAAAATGTAATCCCTAGTACAAGGACGCC[A/G]CAAACTCACACCACAGAC |
| 94 | | 7 | ACTCGTGCGTCCAATAC |
| MI04 | 3 | 15009598 | CTCGATATCGCCGCCACCAGAGCTCCCGTCCATAT[A/G]CTATTACCATTTTGGGCCTG |
| 95 | | 1 | CTTGATTTCTATCCT |
| MI04 | 3 | 15329786 | AGAGCTCTACTATAAGATCCGACTTGCGGCCCCAA[A/C]ACGCAACGTCTCGGCAAGG |
| 96 | | 9 | TTCCTCGCAGCCAAAG |
| MI04 | 3 | 15380779 | CTCGAGTGCCAAAACAACAGCGGAGAAAAAAGAAT[C/T]AGAACTTGAAATGCTTCC |
| 97 | | 5 | ATAATCTACCCTTGGCC |
| MI04 | 3 | 15460115 | TTGGGCAAACAAATGATATTCCATTTGGCCAACAT[A/G]TATTTCTTCTTGTGCTCATCC |
| 98 | | 0 | CCTTGTCAGTAAAA |
| MI04 | 3 | 15474818 | CAGCCTGCGTTCTTGTCGTATCGTACGTCCCATCG[G/T]GGGTTGGTAGAAGGCGTGC |
| 99 | | 3 | GGGAACAGTGGTCACA |
| MI05 | 3 | 15590075 | ACTGGTTGGGAAGGGAATGTTTCTGCTGAAGAAGG[C/T]GCTGACACAGGTATATGGC |
| 00 | | 0 | TCGCCTTATTGCCTCA |
| MI05 | 3 | 15600237 | ATAGCGAGCCAGCTGCATCCCAAGTGTAAAAAAAA[A/G]AGAGAGGAAACAGCTGC |
| 01 | | 1 | GAGGCTTACCCTTTTTTT |
| MI05 | 3 | 15697889 | GCTGTTCATAGTGGTAGCCCAGAGATCTGCAGTTG[A/G]GCTGGTCAATTGACCCGGC |
| 02 | | 0 | TAAACAGCGCAACGTT |
| MI05 | 3 | 15849328 | CCTACTGAACCTTTCCCTAGTAAAATGTAGTAGCA[A/G]ACAACTCTCCTAGGTAAAC |
| 03 | | 5 | AAATATACTGAAACAA |
| MI05 | 3 | 16039758 | CAGCTCAGCTCAGATAGCCTGACTGAACTCCTACA[A/G]TCAACCAATCAGATGGATA |
| 04 | | 2 | ATATCTTAAGCCGGAG |
| MI05 | 3 | 16613670 | CTGGATGTAGCACATCAGATTTGTAGACCAAAAAT[A/C]TCGGCCTGTTAGCTGTTACC |
| 05 | | 8 | AAGCCTACATGGTGT |
| MI05 | 3 | 16851981 | AACATTGTGCGATTTTCTTCATTTTCTAGCGAAGC[C/T]GACCTTTGCAGCCACGGCGC |
| 06 | | 2 | CCGTGGCACACCGGA |
| MI05 | 3 | 16853365 | ATGCCGCACACACAGGCTTCTCGTACGATCATTTT[G/T]AGGTGTAAATATGAGAACGC |
| 07 | | 6 | CAATCTCATACATCA |
| MI05 | 3 | 16856742 | CACCTAGTTTAAACTGGTTTTTAGACGCTGGAAGG[A/T]CTCCAAACATGTTATTTTTT |
| 08 | | 4 | TTTATCCGGTTTCTA |
| MI05 | 3 | 16864821 | CGAGCGGTGTCATACCTCCGCTCACTCTAGATCAC[C/T]GGAGGGGGTGAAGAAGGTT |
| 09 | | 6 | CTCATTGGAAAGGGAA |
| MI05 | 3 | 16890559 | AACTGGCCCCTGTATGGATTGTACTGCCTTCAATT[A/G]TGGTTTGATACTGAATGTGC |
| 10 | | 6 | TGAAACGACCGGTTT |
| MI05 | 3 | 16942178 | TCTATCGTCGGCGTTTGTTTACTGCGCCAGGACGG[C/T]ACGCCGTAAAGGTTTGAAG |
| 11 | | 0 | TGCAGATCGATCTCAC |
| MI05 | 3 | 17554010 | GTGCCTGCCACGATCATTAGGCCCAGCCACGTGCA[A/G]GATGTTCCGGTCGTATGAT |
| 12 | | 9 | GAGGCTTTAACCGTAG |
| MI05 | 3 | 17572915 | CAGATCAACATTGGTAGTTATGCAACCCCTCCAAC[C/T]GCAACTGTTTTTGCATCAGC |
| 13 | | 2 | CTCTCCTACCTTGTC |
| MI05 | 3 | 17636418 | AAGCAAGCACAAGAAAACTCAAGCAAATTCGTCCT[A/G]CTTAGAGAACTGGCTGTC |
| 14 | | 5 | AGGAGTTGTGGAGGTAG |
| MI05 | 3 | 17664584 | CTTTAGGTAGCTGTTCTACGAGTATTGAGTGGAGA[G/T]ATCAGAGATGGGATGGCGA |
| 15 | | 0 | AGTGTGCATACTCGTG |
| MI05 | 3 | 17664600 | TACCCTGAAGTGACTGTGGTTAAGTTTTATAATTA[A/T]TTACGTGCCGTAATCCCATAT |
| 16 | | 7 | GCAGTTTACCTTCC |
| MI05 | 3 | 17684414 | GTCTCAAAATTTATATTATCTTTCTAGCATCTTAG[C/T]TAACTGAAAATCCAGAAGCCA |
| 17 | | 4 | CCGATAGCTACAGT |
| MI05 | 3 | 17903767 | AAAATCGATTCAATGAAAGTTTTAGATAATTCGAA[C/T]CCCCAGAAGCCGGTAGTGC |
| 18 | | 1 | GCATGGCAAATTTGTG |
| MI05 | 3 | 17978295 | GCGACGTAGCCCGAGCCCTGAACTCTGAACTACTG[C/T]TTAGCTGAATCCTGTAATTT |
| 19 | | 6 | CAGTTTTTATTTCTT |
| MI05 | 3 | 18072083 | GCATGTGTGTGTGCAAGTGCAACAATCAGCATGCA[C/T]ACGCCTTGCGCCCTTGCCT |
| 20 | | 6 | CCTCCATTAATTAATG |
| MI05 | 3 | 18161860 | TCGGTCGGTCGATTTGCAGTGCTGCCTTGACCCTT[C/T]CAGGCAGCTACCATACCGTG |
| 21 | | 5 | AAGCCGTGAAGGAGC |
| MI05 | 3 | 18184451 | CAGGCCGTTGTCTCAGCGTCAGCGATTCCTCTCCA[C/T]TCGTCAACAACCCTTTTTCC |
| 22 | | 3 | TCTGGAAGCAGGAGG |
| MI05 | 3 | 18218384 | ATGGCACCAACTTTTAGGAGTGGCTAACTATGCTT[C/G]GTGTATGTTCTAACATAGAG |
| 23 | | 9 | GACGAGATATACAAT |
| MI05 | 3 | 18367179 | TCTGACGAAAACTTCCTCAAGGTTTGCCCAGTTCT[A/G]GATACACTCGGGCCTGAGG |
| 24 | | 2 | TTTTCGAGCAAGGCTC |
| MI05 | 3 | 18532812 | GCTGCGGCGCTGAAAAGATCTTCTTGGGTAGGTCC[A/G]CCGAGCCGATCGTCGGCA |
| 25 | | 0 | ACGTCACCTGGAACGCT |
| MI05 | 3 | 18722648 | TGTATATCCTTCTTCCTAAGATTATTTCAGAATCT[G/T]CTCAAGCCGAACATAGGTTTG |
| 26 | | 8 | ACAGACCGCACAGC |
| MI05 | 3 | 18745002 | CTATGATTAAGTACTAACTATTAAACTTAACAATA[C/T]AACTATAAATCTTGAACCCAT |
| 27 | | 7 | TAGGATATAGTGCC |
| MI05 | 3 | 18804262 | ACAATGGATGGAGCTACATGGTCGAAAAGCTTGGT[C/T]CTCAGGGAAAGCGTGGTG |
| 28 | | 2 | GAGGAGGGGGCTGGAAG |
| MI05 | 3 | 19017295 | GACGTGATTTGCTAAAATCTAGACTTAATTCTAAC[A/G]ATTTTACATTCCTGGTGGAC |
| 29 | | 5 | TGCGGGTTGATTCCC |
| MI05 | 3 | 19090001 | TCACATCTATGTGTATATCCTCTCCCTACGACTAC[A/G]AGCCTTAAGTTGCTGTCACTA |
| 30 | | 7 | AGGCCAGTCCTCTG |
| MI05 | 3 | 19183059 | CACAACAGAAAAAAAAACGGCCACCGGCAGCCCCT[C/T]AGTTAAATAAGATTTTTA |
| 31 | | 8 | GTTGACCAGGGCAAGCG |
| MI05 | 3 | 19208551 | TGTTATCCATGAGCTACCTAGGTTCGAGGCGCTTC[G/T]TGATGTGTGTGTCAGCTGAT |
| 32 | | 6 | CGGGTGGAAGGACAA |
| MI05 | 3 | 19410370 | AATTCTCAAATTTTGTCTTTTGCAAAAGAGGACTA[A/C]TGGACATTGAACTGATCGTA |
| 33 | | 8 | GGCTTGGAGGAGGAA |
| MI05 | 3 | 19429403 | CCGCGACCCGCGTTGCTGAGCCGCTCTTTTTTTTC[C/T]CCAGTCACGCACGCTGTTGT |
| 34 | | 7 | CGTTTCTTTTTAAAG |
| MI05 | 3 | 19663507 | TAGTATTCTATGTTCACGATGTTTCATCGAACTAG[C/T]ATTAAGTTGTGTTTATACTAG |
| 35 | | 5 | CATATGAGATTGTC |
| MI05 | 3 | 19934706 | GTTGACTGACGCTGTCCAGACTTATATCAGTTCCC[C/T]TACGGCTTTTCCTATATATAC |
| 36 | | 9 | TCTGCCCTATAAAT |
| MI05 | 3 | 20010056 | ACGCCCAGAAGGAACAGGGCTGAGAGACGCATGCA[A/G]CCAAGCACGCTGGAGCC |
| 37 | | 8 | CACGTACAACACAACAAT |
| MI05 | 3 | 20250164 | CATAGTGTTGTTCTTCATTTTTTTGTGTTGTGTGC[A/G]CCTATGTTTCTCTCTTTGTGT |
| 38 | | 0 | TGAGTTGCTGGTTT |
| MI05 | 3 | 20350701 | TGTTCCTGTCCATCCTTCAGGTCTGTCATCCTTGC[A/G]CTACAATGCTTCTGTCAATG |
| 39 | | 7 | GGTGTTCTCTTTTCG |
| MI05 | 3 | 20465999 | AAACTATTACTGTATGCCAGCTAAAACTTTCGTTG[C/T]AGATGAAATTAAGAGGAAG |
| 40 | | 9 | CAACTCCTGAGAAATT |
| MI05 | 3 | 20518219 | CTTCCTAACGTGATAGCCTAATACAAATTGGGACA[A/G]CAAAGGGCAGCGCAATTTG |
| 41 | | 0 | TCACCGTAGCTAAAGC |
| MI05 | 3 | 20676243 | TTTTTTTCCCTCTCCTTCAGTCGCATGCTCTTCCT[A/C]ATATTTATGTTCCTTTCTTTC |
| 42 | | 7 | CCTCCCTGCGTGCA |
| MI05 | 3 | 20905213 | ACTTCACTTCAGAGATGTTGCCTCTATGGATGCTG[A/C]CATCGACGCTCGACGCTGAT |
| 43 | | 2 | ACAACACCACTGACA |
| MI05 | 3 | 20954137 | AAGGGATCGTCCCTTCAATTGTTGCACAGCCAGCA[A/G]TACTTTGTCTCTATCATCAG |
| 44 | | 5 | CATGGACAACCTCCA |
| MI05 | 3 | 20991056 | GAAAAGTGTCCTGTTGTATAAACAAAGATGGTAGC[C/T]CTGATCCCTGGTTAGTGGT |
| 45 | | 4 | CACCCAGATAGTAAGG |
| MI05 | 3 | 21084436 | AATCAAAAGAAAGAAACTACAATGGTGAGCCCATT[A/C]AGCGGCTAGCAAACCAAT |
| 46 | | 9 | ACATACCACAGATACCA |
| MI05 | 3 | 21115654 | ATAAATAATAATAGTTTCACATATATTTCTTTCAC[C/T]GAAATCACATACATAAATTTT |
| 47 | | 5 | AGTGATCGACGTTG |
| MI05 | 3 | 21227423 | AATTGGCGCCTCCGAAAAGGTGTCAACACATGTTT[A/G]TTATCTCTGTGTAAACTGA |
| 48 | | 9 | GTTCTGTTGTATCTGG |
| MI05 | 3 | 21330433 | CTTCCGGACTTCGATTTAAATCTAACGCTAACTCT[A/G]GCCTTAGTGCGCATTTAAGT |
| 49 | | 2 | TTATAAATTTCAGGT |
| MI05 | 3 | 21493407 | TGCTTGTAATACAACCTCTCTGCAACTACGGTCCG[A/C]CGTCGCACAGAATTGGACG |
| 50 | | 0 | GGTCCCTATTCATTGG |
| MI05 | 3 | 21494293 | GCGGGGGTCCGAAGGCAATTCATGAATGGAGTGAC[A/G]ACGATAGGAAGCTAGTAC |
| 51 | | 7 | AAACTTTTGATCCATCA |
| MI05 | 3 | 21500922 | TTCTTTCATGATCTTGGCATTCGACTTTATTCCAT[A/C]TTGTGTCTTGTACTCTTGCAT |
| 52 | | 5 | GTTGTTGTAGATCT |
| MI05 | 3 | 21542032 | TTCTTTCCGTATCTAATCCGTCGGCAAACTGAATC[A/C]TGAATCCCCTTTCAGTATTAA |
| 53 | | 3 | CCTTTTCCGAAGCT |
| MI05 | 3 | 21585827 | AAAAGAAATCAACAACAAGCTCACCAATAGTTTGC[C/T]TGGCTTATTTTCCTTTCTTT |
| 54 | | 7 | GTATGTTGCTCTAGA |
| MI05 | 3 | 21634954 | GCAGAGTCTCTGGTGGAGGAGATCGCGTCACCAAG[C/T]GGGAGCTCAAGGTACGAA |
| 55 | | 1 | CTCTGCTCCCGTTTCAG |
| MI05 | 3 | 21687531 | GGTGGACGAGCTAGAGACCGTGACGACCTTGCGGA[A/C]ACGTACAAACCTATTAATT |
| 56 | | 7 | GGCCATGCCGACGAGG |
| MI05 | 3 | 21764662 | GCTGAATTGGCACTGTCATTAAGATTCAATCCCTT[C/T]TGTTTTCATGTTTTTCCCCTC |
| 57 | | 0 | ATCCCTGCCGTTCT |
| MI05 | 3 | 21809087 | ATGGTTTGGATGGCGGCGTGCACGGTATGGGAGGC[A/G]GTGGCGATTGGAGAGTAG |
| 58 | | 3 | ACTGAGGCTGAGAAGAG |
| MI05 | 3 | 22060440 | GTCCACGGTCCACAGAGACAAATCTGTGGCTGTGA[A/G]CCATGCACCTCCGCACGC |
| 59 | | 6 | GATCTTATCCTAACCGA |
| MI05 | 3 | 22172368 | ATATCCTTGAACAGTGTGAACGTTGAAGCCACATC[A/C]CCTTTCTTAGCATAAACAG |
| 60 | | 9 | ACATCAATGCGTTCCA |
| MI05 | 3 | 22566796 | GCAGTAGAAGCTGATATGGATTAAAGTCAAGCGAA[C/T]AGGCTCTAATGCATAGAGA |
| 61 | | 7 | CAAAACGACGGTTGAA |
| MI05 | 3 | 22656637 | AAAAAAAAACTATTGACCAGGTGTTGAAGTTGTAT[G/T]GTGAATTATGATATTGTCCT |
| 62 | | 2 | TGTTCTGTTTCTAAT |
| MI05 | 3 | 22659761 | GCTTTCATAAGTCCACTTCTAACGAGAATCACTCT[C/T]GTACAGCCAAACGGTAAAA |
| 63 | | 2 | AAGTGACATGCTTCAT |
| MI05 | 3 | 22665557 | AGAGTCATGGAACACCTTGCGCTTTCCTTTGAGTG[C/T]GGTGCTTGGGTCTGGTGTA |
| 64 | | 6 | CAGTTTTCACCCACAC |
| MI05 | 3 | 22688511 | ACCATAGGGTCAAGTAGTATGAACATGAATAAGTT[C/T]CGTAATGATCTAGCGAAGGC |
| 65 | | 8 | ACTTTGCGAGTCGAG |
| MI05 | 3 | 22771166 | TCCTCGCAGAGGGGGCCCTCGATGACGATCTGCTG[A/G]GACCCTGTGCTGCCCTGCA |
| 66 | | 4 | ATATATATAATAATCG |
| MI05 | 3 | 22804273 | AAAGAGGTCTCTACGAGAATATCTTAAACCTCATG[C/T]TGACGTAAGTTCCTGACCAT |
| 67 | | 3 | TTTTTTGCCTGTTTG |
| MI05 | 3 | 23194752 | TTGGCTAGAGAGACCATAGACACAATGTTTTCTCG[A/G]TTCCAGTCGATTATCAACA |
| 68 | | 3 | ATATGCGTGCCAATAA |
| MI05 | 4 | 596469 | CTATAATATATATCGCTGTGGATCGGAGTACATGG[G/T]CACAGTGGTGACGGATGGAT |
| 69 | | | GTATGTATGCATGTG |
| MI05 | 4 | 2414811 | GTATACTTTTAGTGTTTTTGTTTAGCTAGAGATGC[G/T]AGTGTGTTTGCTTGTTGTTGT |
| 70 | | | GCACAGTTTGTGGT |
| MI05 | 4 | 4483125 | CTTGCTGGCCACTCGAGTTATAGAAAGTTGCATTT[A/G]TGTGCATCCCACGCCAGCC |
| 71 | | | AAACACTGCCGACGAG |
| MI05 | 4 | 5387279 | CTCACCTTTTTGCCAGCGATGGGCACGATCCTGAG[A/G]GTGCCGGAGGCCTTGTCAA |
| 72 | | | GGACGCCAAGCGCGTA |
| MI05 | 4 | 6396382 | GCAAAACTGCATCGGAAAAAAAGATGGGTGGCTGT[C/T]TCTTCAGCTTGAATAATAC |
| 73 | | | ATTTGTCACAGGTGTA |
| MI05 | 4 | 6631372 | AACAGCCAGTAAAAGTTGCGGCCACCAAAGAAAAC[C/T]GTGTGCCCCTTTTCTCCTT |
| 74 | | | AAACTAAGGAAAAAAG |
| MI05 | 4 | 6647617 | GATGGTAGGCTTCAGTTATCATAGGATATGTTATA[A/G]CATCAATATGATGAGGCTAAC |
| 75 | | | TCTATCCTTTTGCA |
| MI05 | 4 | 10229304 | TCCATCATCATAGCTTTCGCACTTTGTAATCTCCC[C/T]GGTGATCTTTAGCCACCATCC |
| 76 | | | ATTGTCCACTAGCT |
| MI05 | 4 | 10797562 | GTCGTTGAATGCGTCGTCATAGCGGTTGGACCATC[A/G]AACTATCCAATGATAACGA |
| 77 | | | ATTCCAACTACAACGA |
| MI05 | 4 | 12922418 | GTTCAGGGAAAAACTGACCCAAAATCAGAGCGTTT[G/T]GCACTCAGATCAGCTTTTG |
| 78 | | | GCGGTCACAATCTAAA |
| MI05 | 4 | 13123231 | ACCATTAATTTCCCGACTTCTACATGTATTGTTCA[C/T]TTATGTAGGTAAGTCCACAAA |
| 79 | | | AAAAGTTCAAAATT |
| MI05 | 4 | 13816193 | CTCATGCTTCATATATGGTGCTCGACCTCCACATC[A/G]TTATCATGTAGGTGTGATAGT |
| 80 | | | GCCCAAAGCAGCGA |
| MI05 | 4 | 14527969 | ATGGCAAAGGTAGGAAGTAATTAGGGGTGAACGTG[A/C]ACTCACAAAATTTTACAA |
| 81 | | | AACCAGTGATTTATTAT |
| MI05 | 4 | 14884472 | TATTAACGTGATTGCCGTATTTTTCTTATTCTTTT[C/T]TAGTAGATTCGTATGCCATTT |
| 82 | | | ACACTTTTAGGACT |
| MI05 | 4 | 15819509 | GCCCACTCATCAGTCGTGCGTGTGTCTGCTCCCGC[A/G]CGCTCGCATGCTGGTTCTTT |
| 83 | | | TCTCGGCTGTTGATC |
| MI05 | 4 | 16892214 | TAGGAGGAACATATCCGATACCATATTGCGTAGTG[G/T]CCTCACAAGCAATGTGGAAC |
| 84 | | | TGTAGAGAGGTAATT |
| MI05 | 4 | 17181639 | TCCTAGCCGCGTCTGAGCAACCTAACCTACCCGCC[G/T]CTTGCTTTTTATAGGGCTGG |
| 85 | | | GGGACGTGTGGGAGA |
| MI05 | 4 | 17317457 | GGCGGACGTATGCCGCGCTGCTGTCCAGTGGGGCT[A/G]GGCCACATCGTGATTTGCC |
| 86 | | | CTGTCCATGGATTGTA |
| MI05 | 4 | 18762816 | ACAAGTATCGGGTGGCACTCTACTTGTTCTAAAAT[A/C]AAAAAAGGTAGAGCTTGCC |
| 87 | | | TGTGAACCGACCAGTA |
| MI05 | 4 | 18929490 | GAAAGGTTGCCTTGCCATGATGACTCTAGTAGCAG[C/T]CCTCACACGTTTCCACCTC |
| 88 | | | ACTAGTGCCATGCTCC |
| MI05 | 4 | 18938489 | AACGGAAACAATACCAGTGTTCGCTACAATACAAA[C/T]TGTTAAAAAAAGGAGGAA |
| 89 | | | AAATACAAGCAAGACTG |
| MI05 | 4 | 20883311 | TGTCCCCTTTGTTGGTTTGGCATGTTGTAGGTAGT[G/T]GGAGCAGGATACAATTTTGC |
| 90 | | | TTCACATGGGACGAT |
| MI05 | 4 | 22733202 | TGCCCTACAGTAAGGAACATTATGAGTTCAACTAT[A/C]AGTTGTCAATATTGTTGGTT |
| 91 | | | TCTGTTCTAGTCTGC |
| MI05 | 4 | 23215098 | TTAATTGTTTGCCCTTGTTAGGTCTGCGAGATAGC[A/G]GTCCCTTATCTTGCGCATCTC |
| 92 | | | GGCTGCGGCATCAC |
| MI05 | 4 | 23816593 | TTGCTGGGGAGGGAGGTGCGTGAGAATCTCTTCGA[C/T]GACGTTGCCACACTCTTCC |
| 93 | | | ACGACCTGTGCAACGG |
| MI05 | 4 | 24436803 | CTCATGATAAGTAGATGGTTCAACAATTACTGTAG[C/T]AGCCCGTGGAAAACCATAAC |
| 94 | | | GATCTGGAGGTTCAA |
| MI05 | 4 | 24663248 | GTTACAGATTCGAGCACTATTCTAAGTTGTAACTC[C/T]GATGTGCTGCTTTCGTGTGC |
| 95 | | | TCGTTCTTGTCTTGT |
| MI05 | 4 | 24688037 | TTCGGCGTAAATAAAAGTATCAAGTGCGGAGTAGC[A/G]AAGGGGGAGAAGCTAAAG |
| 96 | | | TCTTGTGCGGTAGGAAA |
| MI05 | 4 | 24925231 | TATTTTTGTTGGAGCTATCATTTTATCGTTGTTCT[A/G]GGATGCCAAATTCTCATGGTG |
| 97 | | | ATACTCACTAGTAT |
| MI05 | 4 | 26010181 | AAAATATATATATAAACGGGAGGACGATTGGACGA[A/G]AGGAAGGAGCACGTCCTTC |
| 98 | | | GTCCGATCCAAACACG |
| MI05 | 4 | 26745100 | TATCGTGTAGACCATTGGGTGCACTTAGACTTTTT[C/T]AAACTCGGGATGGTAAGCTC |
| 99 | | | CATATGGTAAAGTCA |
| MI06 | 4 | 26915339 | AGTACAGCCGGGTCACCCGTTTGTTTTCTCTTGCT[A/G]AGTGAAATTTGATGCTAGTT |
| 00 | | | AGAAATATTAAATAT |
| MI06 | 4 | 29078289 | AATTTGACCTTTTTTAACCGATCAATTACTCCTAG[A/G]CCAGCACACATTCTCCATCTA |
| 01 | | | GGGAAAACAGTGCA |
| MI06 | 4 | 29393688 | TGAAGGAGTCACAATATGAATTGTTATAACACAAG[C/T]CCTGGCCTCAAATATTTGTT |
| 02 | | | TATGAAACATGAATC |
| MI06 | 4 | 34568795 | TCTTGTGAGCCAATTAGAGGAAAAACATATGATCT[C/T]AAAACATTCAATACATGTTT |
| 03 | | | ACTTTAGCCGTTCAT |
| MI06 | 4 | 35853582 | GGACAAGGTCTGAAGGAGATGCTGGAGTACTACGA[C/T]AATGCGGTGAGTCCGTGA |
| 04 | | | TGGGGATTACCATTTGC |
| MI06 | 4 | 36062406 | TAATCCCATGCGGCTTGCTGCTTAGTTGGTACACC[A/C]TCCTGCGGTTTTAAACTAAT |
| 05 | | | ATAATGGCGCCAGTA |
| MI06 | 4 | 39828296 | GGTGGCGATTCATCGCCGGAGCCCCCTGGAACTGG[C/T]GAGCTGTTTGGTCGATCCG |
| 06 | | | CTGTGACTGTGATGCA |
| MI06 | 4 | 45694268 | GTGAGCCGCATACATGAGTAGGAGAACTGTCTCCA[A/G]TACGCGAGAGGTAAGAAG |
| 07 | | | CGTTTGAGATTTCAGTT |
| MI06 | 4 | 51011956 | GAACATTGTTTGATCCCGAAACTCAAAATCCTAGC[C/T]TTCTTAGGTAATATTTGCTTT |
| 08 | | | ATCCTAATGCAGTA |
| MI06 | 4 | 52769850 | CGTTTTAGAAATAACCTCTGAGTTATATCAAGCCA[C/T]GTCGGCGTTTTAGAAGTAAC |
| 09 | | | AGCCGAGTGATGACT |
| MI06 | 4 | 54904158 | GACAGCGCGACGTTCACTTCCTAACAGTAGAGCGC[A/G]AAGACAACAATAGTCCTC |
| 10 | | | ACCCAGTTAAAAACAAA |
| MI06 | 4 | 55263339 | GATTATATTATATATAAGGTAAGAAAAATTATTGA[A/C]AATTGCATATGTGGAAAAATA |
| 11 | | | GATGAAATATACCA |
| MI06 | 4 | 56168910 | CCACCATCGATCGTTACCTTAGTTAACTGCCGACG[A/G]CCCATTGTGGCCGTCGGAC |
| 12 | | | ATAAGCAAGATGTGTA |
| MI06 | 4 | 56337464 | AGCTAGGAGACATCCATGACCATGACCGGTGGTGT[C/T]CTGAAGAGACGCGTCTGA |
| 13 | | | AGAGAGGGGGGCCTTTT |
| MI06 | 4 | 56366009 | TTTTGGATCGATCAAAGCTACGGATTTTGGTCAGC[A/G]ATGCTTTACTAACATAACAT |
| 14 | | | CAATCTATCCAGATT |
| MI06 | 4 | 57836302 | TCACACGAACCATAGTCAGTAAACCATACAACCAC[C/T]GCAGGGAGCCATTTGTCCT |
| 15 | | | CACGTGATGACGTGAA |
| MI06 | 4 | 60018315 | CGACTGATGACTCGACCAGTAAGTAATAAACAATC[A/G]ATCTATGGACAGCAGGAAA |
| 16 | | | TTTCAGACAGTATCCC |
| MI06 | 4 | 61026968 | CGTATTTGCTCCCTGATCTTTACGGAGTACTTCCC[A/G]GGACCAGCCGTCAGTGGTAG |
| 17 | | | AGGCGCCCGTAGAGA |
| MI06 | 4 | 62266919 | ATTCCCACTCATACACAAAAACAGCTGCCAGTTGG[C/T]CATGGAAGATGAGAACGA |
| 18 | | | AAAGAAAAAGGAAAGCA |
| MI06 | 4 | 62813721 | TTTGTTTTTTTTTTCTTTACCGCAGTCAACCATTC[A/T]TATTTCATCAGTACATTGTCG |
| 19 | | | TTGTTTGATTCGAT |
| MI06 | 4 | 70395376 | CCACGTTAGCCTCAACGATGTCCACAAGCCAGTAA[C/T]GTGGTGGACTTACCGCGAC |
| 20 | | | CCCTTTATGGCGGTTC |
| MI06 | 4 | 75029980 | GAAGGAAGCCCATGACTCTGACTATTCCATTCATC[C/T]CGGTAGCACCAAGATGTATT |
| 21 | | | AGGATCTGAAACAGA |
| MI06 | 4 | 75342026 | ATGGAGTATCCCTACAATGAAATCATTGGTCAAGG[G/T]ACACTGAACGCCTTTGAAG |
| 22 | | | TGATACTCCACTCAAC |
| MI06 | 4 | 75909294 | TTTTGTCATTTCCATGAGTCCTTTAGATATTTCCA[G/T]TTTTAGAATTTGTACCCTTTA |
| 23 | | | GCAGGTGCTATTAC |
| MI06 | 4 | 77040035 | GTAGAAACCATGGGGGATATGCCCAATGTAGACGA[C/T]TGTGGCTGTGTTTTCGGGC |
| 24 | | | TCTTCAGGCTGCTGCA |
| MI06 | 4 | 77370172 | AAGAACGAACTGACCAGATGGTCAAGCTCGAAAGC[A/G]AACTTCTGCGTCTTGAGC |
| 25 | | | AGCTTGGCTTGCTTTTT |
| MI06 | 4 | 77387825 | GTCTCGTCCTCGAAGCCTCCTCCCTTGAGTCGCTG[A/C]GCAAAGAAGTCGTACTTCA |
| 26 | | | TAACATCTAGGTCGCT |
| MI06 | 4 | 78023503 | TAGAGTTGAAGAACGAGGATTGGTGGAATACGCTG[A/G]CGTAATTGTCCCTGCTCGA |
| 27 | | | TTGCCCCATCCCGCTG |
| MI06 | 4 | 79618987 | CGACTGGATACAATGATAATGCAAACTGACACGAG[C/T]GCAATGGACAGTGAAGCA |
| 28 | | | AAACAATACTTTAAGCT |
| MI06 | 4 | 82264820 | AACATGCATTTCTACGACACACCTGCGTCTGCCCG[G/T]GTGAGTGGGAGTGGAGAC |
| 29 | | | GGTATCTGCATTTAGAA |
| MI06 | 4 | 82387404 | GACGGGAACAAGAAGGACGACGAAGATGAAGGACA[A/G]ACCCTCCAGAAAGGAA |
| 30 | | | AAACAAAATTCTGCCACGT |
| MI06 | 4 | 82669634 | GGCCACCAAGCTGGCAGGTTCTAGCTAGGGTTTCG[C/T]CATAGATGGATGGATGGAT |
| 31 | | | CTACACGCGGTTAGCA |
| MI06 | 4 | 87409783 | TGGAATGGAAGCCTCCTACTACGGTCTGGCAGATT[C/T]AGAGTTTTCTAGCATTAGCT |
| 32 | | | GGATATTATCGACGA |
| MI06 | 4 | 94089079 | AGAAAACTTTCATAGGCCAAAATAATTTGGATTAA[C/T]TGTATACATGCCACTCAGCT |
| 33 | | | TTTGTAAAAGTAAAT |
| MI06 | 4 | 96567536 | GGCCACACCAACAATGTCAGGAGAATAAGGTGAGC[C/T]CACTATACATGTCGCGACA |
| 34 | | | ATAGAAGCTTCCGTTG |
| MI06 | 4 | 11047004 | AATCAAGGTAAGGCTAAGCAATAACCAAGGTCTCA[C/T]TTTGTAGAAAAACTTACTA |
| 35 | | 2 | ATAGTGGATCCTTAAG |
| MI06 | 4 | 11872331 | GGTACTTTGGTTTTGGAGACTGCTACTGACTGCTG[A/C]CGTCGTCGGGCCGCTCCTC |
| 36 | | 4 | TCACCTCTGGTAAATA |
| MI06 | 4 | 11943091 | GAGGCGGTCTTGATTGCTCGCACTGCGATGACGTG[A/G]GACTTGATCCTGTTGGGGA |
| 37 | | 3 | CTTGTTCTCAAATGCT |
| MI06 | 4 | 11972150 | GCAACACTTTCCACTGAGCTGGGGAGGCAAAGAGA[A/G]AGAGAGCTTAGCCGCAA |
| 38 | | 3 | GGCGAAGCAGCGGCGGTA |
| MI06 | 4 | 12277321 | GGGAGTTACGGATCCGGGCGAAAAGAGTTGGTGGC[C/T]AGGACGGGCGCTGTCTGG |
| 39 | | 2 | TGGAGAAGCTCGGCCAT |
| MI06 | 4 | 12455306 | CTTCCCATTTTATTTTCCATCGTTTCATTTTTTTC[G/T]TCTCTTGTTCAGTCATGTGCC |
| 40 | | 7 | GCGCCTCTTTAATG |
| MI06 | 4 | 12597447 | AACATATAGTTAAGGAAAATCATTAATGTTGTATT[C/T]CCTTTATTATTCTTCCCTTGA |
| 41 | | 9 | ATACAAGTGATTAC |
| MI06 | 4 | 12597674 | ACATCGTCATATGCTACCTCACATGGGCTCCCACC[A/G]GTTACCAAGAACTTTGTTTT |
| 42 | | 4 | GCTCAAGTTCCCATA |
| MI06 | 4 | 12689392 | CTCCCACATAGTACTGCATCTCCACTATCGGAATC[C/T]GGCTCTTTGCCGAATGCCAA |
| 43 | | 9 | GTGATTCAGACACTC |
| MI06 | 4 | 12788108 | AATCATGATTCAGTTTTGTTTTTTTGACTTTGGTG[C/T]GAACCCCCTAACAAGTTGAA |
| 44 | | 6 | AGATCTAGCATGGGC |
| MI06 | 4 | 12893982 | ACTGGAGTTCGGTGGTGCGAACGCGACAACGGCGG[C/T]GGTCATGCCGGCGTGCAT |
| 45 | | 4 | GTGATTCGGTGATTCCA |
| MI06 | 4 | 12952576 | CTACTTATATGCACTTGGGCAAGGCACTGGGCAGA[C/G]TACGCAGCCCGGGATCTCG |
| 46 | | 9 | GGATTTTTTTGTTACT |
| MI06 | 4 | 13006743 | AGGATTTTCATCGGCATGACTTGGTTTATGAGGGT[C/T]TGACGTCACCGGCACATGTG |
| 47 | | 5 | GTATGGCAACGCTAA |
| MI06 | 4 | 13030816 | CTTAGTTTGGGCCATAACTCAAATCCTGATCAAAG[A/G]TTAAGCAAAAGGTGAGTTT |
| 48 | | 2 | CCTAGACTTAGTCAAT |
| MI06 | 4 | 14098925 | ACTAAAATTAGAAGCTAGAGTCAGGCACATATACC[A/G]TGTGCCCCGTCATGGGTAC |
| 49 | | 1 | AGAGAAGATTTTTTCG |
| MI06 | 4 | 14601491 | ACCTGGTCAAATAGGCTCAAGAGGTCTTAATGTCA[C/T]GTTTACTATTTGCGGGTCAA |
| 50 | | 4 | AGCTTACCTCGGTTT |
| MI06 | 4 | 14826007 | GTAGTTGTAGTCCGTATTGTGCTGATAAGTTTTTG[C/T]GTACTATTGATGATAATATAC |
| 51 | | 4 | TTGAATGGAGCACA |
| MI06 | 4 | 14980349 | TTTCTTTAGAAGAAGTCTAGAAATTTCGACATTTA[A/G]GTGAGAAGGAATCTCTCTTG |
| 52 | | 6 | ACAAATTTTTTTTGA |
| MI06 | 4 | 15532219 | AGCGATGGTGATCACCTTAGTTAAGCTCGATCGTA[C/T]GGTACGGATACATCAAATGT |
| 53 | | 2 | GTGTGGGGGGTACCA |
| MI06 | 4 | 15714029 | TCTGTGCAACAGATTAACTAGCTGCATTGTTAACT[G/T]TTAGTGCCATGTATATTTTTC |
| 54 | | 5 | TCTACGGCTAGAAC |
| MI06 | 4 | 15781098 | AGACAATATTCTGTTGGCTCTGACTTGCCAGCCGC[C/G]GCAGTCGTGCCCTATCTATG |
| 55 | | 4 | GTGCCACCTTTAACT |
| MI06 | 4 | 15809797 | AGCTCCTCGACAAGGTACGTACACAGATTTGTATA[C/T]ATCGAGCATCTAGCTAGCTT |
| 56 | | 3 | TCTAGTATGTTCAGA |
| MI06 | 4 | 15920083 | CTGTACACAGGTAATAAGGAGATGTGCATTTCAGT[C/T]TTTATGTACTTCATTTTATGT |
| 57 | | 4 | ATTTAGAATCTATT |
| MI06 | 4 | 16367468 | TTCCCCATACCTAAAACATTCACCCATGGCCGCGA[C/T]CCCTTCATCCTCCTGAATCC |
| 58 | | 7 | CGGCCGCCGCTTCTT |
| MI06 | 4 | 16392653 | CCCATAGATCAAACAAGCAGTCTTGTTGAAGAAAA[C/T]CCCCCTGGACAATCCTCTT |
| 59 | | 2 | CAATTGCTGATGCGTG |
| MI06 | 4 | 16420104 | AAAGTGACCGATGATCATATATGCAGATGCCTGAG[A/C]CTGTGAGTTGAGGTGGAGT |
| 60 | | 8 | CTGTTCAAACGAAATT |
| MI06 | 4 | 16911433 | CCTATAAAAGGGCCGCCCTGAGCCCATCATCTCCT[C/T]GCACCGGCCTCGGCCACTC |
| 61 | | 0 | TCCTCCCCCTCCCCTG |
| MI06 | 4 | 16999430 | AGTGTATAAATATACAGTGAAACAGCTTGCACTGG[A/G]GACACCACTTCCCAACGCA |
| 62 | | 2 | AGCTCTTCCAAAAATT |
| MI06 | 4 | 17027675 | ACAGAAGGCATAATCAATTATCTATCTAGTAAACC[A/C]TTTTGGTTTGCATGCTGCCAT |
| 63 | | 6 | ACAAAAAATGGTAA |
| MI06 | 4 | 17180224 | AAATAACGGGACCGCAGGCGATTGTTAATTCAGAC[A/C]GTACATGATCTTGATTATAG |
| 64 | | 9 | CCATATATATGAAAC |
| MI06 | 4 | 17286526 | ACAATACAGATGAGCTAATATTAAACATGATCAGA[C/T]GGTAGGATTAAAACTGACAT |
| 65 | | 2 | ACCTTTCCCATTTGT |
| MI06 | 4 | 17540498 | AGGGGATCAGAGGATGGAGTTATCCAAATGTAGGC[G/T]GGTACAACTGAAGAAACA |
| 66 | | 2 | GGAGCCGGGAAGGCGAA |
| MI06 | 4 | 17767392 | CTAACCCTTCTCCTGTTTCAAATCGTTTCAGACGT[A/G]AGAAACCAGCCGGTCCTCA |
| 67 | | 8 | TCCACTGCAAGAGAGG |
| MI06 | 4 | 17862434 | AGGCGCTCGATAACAATAGGCGATGTGGCACTAAA[C/T]GGCAAACAGACACACTAC |
| 68 | | 8 | CGCTTCTATCCGCCTGG |
| MI06 | 4 | 18108678 | AATGAAAACATTAAACATGAATTCATGGAGCACCT[C/G]TCTTGTTGCTCCACTATATT |
| 69 | | 4 | GGTAGAGTTAGGGTA |
| MI06 | 4 | 18145405 | CCAGGTGGTGTAATTACAATGCATGTGGTAGTGCG[A/G]CCTCCACAAGCTGACAAAA |
| 70 | | 0 | ACAGTGGTATTGCCGA |
| MI06 | 4 | 18321342 | TGCCGGAGAAATCCGTGCAGGAGCAGAACTCAGTC[G/T]CATCATCTTCCTCCACCCG |
| 71 | | 6 | ACAGATGATTGGAGGA |
| MI06 | 4 | 18604399 | GTGGAGAGTTCATCGCCATGGAGTTCACCACCTAC[C/T]GCTCTGACAAAGGTATTCA |
| 72 | | 8 | GCGGCACTTCTCCGCT |
| MI06 | 4 | 18744259 | TATGCGGGCGGCCTTGTTGAAAACACGGTAGACAT[A/G]CTTGACCGATCCATAACCA |
| 73 | | 0 | AGAAGAAAACATTCAT |
| MI06 | 4 | 18806297 | CCTTAGGATTTTCAGAAAACTGGCAGGTATGAAAC[C/T]CAATTCTGATAATAGAGTCA |
| 74 | | 5 | AAATATCTTGAGTAT |
| MI06 | 4 | 18823446 | GTGCTTCCAACTTGATAAGGTAGTAGCTCCATGGC[A/G]GTGACTATATGGGAAGAATC |
| 75 | | 6 | AAAAGAGTTCCTTAG |
| MI06 | 4 | 18867299 | ACTTTTGTCATGAAGCAACAGGAATCCCAGGCTGC[A/G]GTCTTATCAGTTCATCACAT |
| 76 | | 7 | TGGAGTCCCCTGTGT |
| MI06 | 4 | 18951701 | CATCACAGTGAGGATCTGGCAGAGGCGGCTTTCAG[A/G]GAATCAGAGGTAAAGGAT |
| 77 | | 3 | CCGATCCACCGCGCATC |
| MI06 | 4 | 19007553 | TCATCTCTCTGGAGCTACTTACTAGGCGGCGGCTA[G/T]AGCTAGGCGTATCTCTTCTT |
| 78 | | 4 | CGTGCGCGATGGTGG |
| MI06 | 4 | 19007870 | AGTTTCCACTAGATTATTCTTGAGAAACACTCATG[C/T]CCATGTGGTCGAGCCCTAAT |
| 79 | | 3 | CCTTGGTTCTTGATT |
| MI06 | 4 | 19115395 | AAATATAAAAGAATTGGGCGGGACCTAATTGTATT[C/T]TGTATCACGTTTTCTACCTCT |
| 80 | | 0 | TTGCATCGTTGATA |
| MI06 | 4 | 19283667 | CCTCAGGATGTTGCGACTACACTGTGACGACGTTG[C/T]CACTCACAATACGCCGATC |
| 81 | | 4 | AAGACTCCCTCCATTA |
| MI06 | 4 | 19343564 | CCTGTGAATTAAAGTCACATGCATTCTATCACATG[A/G]TGTTAATTATCCAAAATAAA |
| 82 | | 6 | AAGCAATCCCAATGG |
| MI06 | 4 | 19378743 | AGGGAGGCGAGTTCTTTGATTCTATCGATTTGGCC[A/G]TGCAAGTGCCGGAAATCTG |
| 83 | | 4 | ATGTAGGTGTACACCT |
| MI06 | 4 | 19512304 | CCCCTGAGTCTATGCTTAATAGAAAGACCAATCAC[C/T]GCGATATTTTATTTTGTCCGT |
| 84 | | 9 | TTGGAGTCTAAGTA |
| MI06 | 4 | 19550641 | ACTTTATAACATATATGTAGTCAAATGAAAAGGTC[A/G]TATGTGTATTGAACCCAATCA |
| 85 | | 1 | AGCTAGTTTCGAAT |
| MI06 | 4 | 19642108 | GGAATTTGGCACGGGATTGAAAACGGGTCTCACGA[A/G]CTAATAAAAAATGATCAA |
| 86 | | 6 | ATTTATGGGCGCGTTAG |
| MI06 | 4 | 19971934 | AGAGGCAGATCCAGACGGACACTTTGATAATTTAT[C/T]ATTGTGGAAACAACATAAA |
| 87 | | 1 | GCTATGGAACTTATCT |
| MI06 | 4 | 20102536 | ACAATAATAATTAGTCGATAACGATGCAATTTAGG[A/C]AAATACAACAAATTCACCTT |
| 88 | | 2 | AAAAGACCTTATCTT |
| MI06 | 4 | 20198832 | AAGCACTTGCCTCCTTCCCTTAGAAGCCTCTCTAA[C/T]GTCGCGCCTCTGTGTCTGCC |
| 89 | | 6 | TAGCTTGTTCCCTGC |
| MI06 | 4 | 20240083 | ATTAAATTCGGTCCCGTATGCATGCATCGATCGGC[A/G]CCTAGATCGGGGGATGTTGC |
| 90 | | 3 | CAGTACCATAGATGA |
| MI06 | 4 | 20246428 | TGCTCCGCTGAGATGAGGGATTTCCACGCTTATCC[G/T]TGTATGTCTATTGTCTAGCCG |
| 91 | | 0 | ATGACGAGGAGGTA |
| MI06 | 4 | 20287966 | CAAAATCAACGTGAACACATAATCGGCAGAATCGT[C/T]GCGATAGGAGTCCGTCATT |
| 92 | | 5 | TCCTATATCCTAAACC |
| MI06 | 4 | 20351610 | GTAGTTTGCTTGTGTCGTTGGAATTTCTCATCCGA[A/G]CCGAGCCTCCGTATCACCTC |
| 93 | | 4 | CGCACATTGCCATGG |
| MI06 | 4 | 20355378 | ACTGATCTTTCTAGATCGATGACATATTATTCTTC[A/C]TCATCAGATGTACCAAACTTC |
| 94 | | 3 | AGAGCTGGAGGTCG |
| MI06 | 4 | 20382449 | ACAGTAACTTCAAGGCTCGATGGGACATGGAGGGA[A/C]TGCAGAAGGATCTACAGC |
| 95 | | 2 | ATGTTCTGGAGATACGT |
| MI06 | 4 | 20451767 | ATAATTTCAATCACGCATTATAGTTGATAGACTGG[A/G]CCGAAGGTGGATACTTAACA |
| 96 | | 0 | ACCGATTCACCAATG |
| MI06 | 4 | 20609718 | TATTCCTTTTCTCTTCATACAATACAAATTTACAG[G/T]CATACCTTCGGCTCCTTGACA |
| 97 | | 7 | CAAGATAACACAAA |
| MI06 | 4 | 20725827 | GTCCCACACGATGAGGTTCTTGTCCTTGACGATCA[A/C]CTCCACGTTGTCCGCCTGC |
| 98 | | 9 | AGCTGATCCTTGGAGA |
| MI06 | 4 | 21093585 | TTCACTATCACATGTGAACCTTGAGGACTGCTCTT[C/T]TCAGAGAGCAAAGAATTCG |
| 99 | | 2 | GCGAATGTGTGCTTTC |
| MI07 | 4 | 21206505 | TTCGTAGCGTCATCTAGAGAAGTGCTACCTTTGGT[A/G]GTCACTTTCTTAGGGGCCAT |
| 00 | | 5 | CGCAGGTTTGGGTTG |
| MI07 | 4 | 21238398 | AATGTGAGCACATAAATGGATACCAAACTCAATCA[A/C]ACTCACTGTGTGCGATTCA |
| 01 | | 7 | AGATCACTAGCGACTA |
| MI07 | 4 | 21430519 | GCAAGCCCATATAGTCTGCCACGGATTGCATCATG[C/T]CGTCCTTCTGAAGAAGCAGT |
| 02 | | 8 | TGTGCTGCACCACTG |
| MI07 | 4 | 21831654 | AAACCTTTTTTTGACTTTGGCACGATGGAAGTCGC[C/T]GAAGCAGCAATCTTTCTTTT |
| 03 | | 2 | CTTTCCTTGCTTTCG |
| MI07 | 4 | 21906989 | TTTATAAATCATGAGAAAAGGTATTAAAGCAATAA[C/T]CAATTCAACTTTAATATGAGT |
| 04 | | 9 | TACATTTTGGTTAG |
| MI07 | 4 | 22350112 | GATGAGCAAGGTATTGATCCATCTTGGGCTGCTGT[A/G]GTTACGCCGGTTTTACGAGT |
| 05 | | 8 | CAAGACAATTTATAT |
| MI07 | 4 | 22579962 | TGATCACAACTGCTTGTATTTTTGGAAAATATCCA[A/G]TCAAACTTTGAAACTTTGAC |
| 06 | | 6 | CGCCAATAACTTTTA |
| MI07 | 4 | 22608528 | TGTCAAATCACGTGGACTAGCCTACGTGGTTTGCG[C/T]CGATCGGCTCCTTGAGCTG |
| 07 | | 1 | TTGGTCGTTTCTTTTA |
| MI07 | 4 | 22651897 | CACCATTCAAAAACTGATTTATATATTATGCAATG[C/T]GCTATAAGAGAAGGTTAAGA |
| 08 | | 9 | CATCCCCATCGAGAT |
| MI07 | 4 | 22679090 | TGTTTTCTTTTCTTTTCTGGATATCTATCCATCCA[C/T]AGACACGCGAAATGCATTCCA |
| 09 | | 3 | CAGTTGTCCTATGT |
| MI07 | 4 | 22726989 | TTCATGTGATGGATCTGACCGATCATTGGTTGGTC[C/T]AGATGATGGATATTGAGTGAT |
| 10 | | 6 | AAATAGCTCAGTGC |
| MI07 | 4 | 22774979 | CAATTGGTACATATGCATTGCGAGTTCTGAGATCA[A/C]ATAAGTAAACAATACATAAT |
| 11 | | 5 | CAAATGGGCTGCTTT |
| MI07 | 4 | 22796464 | TTAATATTAGATGATTTAACTCACTCCTATCCCTC[C/T]CAATCATCTCTATCCCAACAA |
| 12 | | 5 | GCTTCGAAGGGATT |
| MI07 | 4 | 22799801 | AGCAACTTGTCATTGGCAAGGATGATGTGACCATT[A/C]TGGTTCTTAGACTAAGCCCT |
| 13 | | 0 | CGTGTGCTTCTTGAA |
| MI07 | 4 | 22934998 | TACTTATCATGCTTCATTTGTAAACTGAACATTGT[C/T]GTTTTAAATAATTCTATCACT |
| 14 | | 3 | TCTACATGTATGTA |
| MI07 | 4 | 22935067 | TGTGCACCCTAATATTCTAGCAATGGTGACTAGGC[A/G]TATTAACAAATATATAAAGC |
| 15 | | 2 | ACTATCTCTGGAGGG |
| MI07 | 4 | 23117441 | GATGCATTTTAATTGTTGAAAGGGTCATGATGCCT[A/C]AAAAGAGGGTGAATTAGGC |
| 16 | | 3 | TTATCTAAAGTTTCTT |
| MI07 | 4 | 23175237 | CTATTGCAGGTTGCTGACTGCTATAGAGTACATGA[C/T]ATCCATTTTTTCCCCAACGGT |
| 17 | | 6 | ATTAATCAACACTT |
| MI07 | 4 | 23186292 | CGATTTTGGAGAGGAGTGGCACTGCTGCCACATCA[G/T]ATAGGGAGTGGTACGACCT |
| 18 | | 1 | AGGATGCTCGAAGACT |
| MI07 | 4 | 23303688 | TGCATTCTGGCCACAACTCGATCTAGGGATGAATG[C/T]GGCCATCGACAGATGGGAT |
| 19 | | 0 | CTCGAGGCAATGGAGG |
| MI07 | 4 | 23347075 | CGAGGAATTCGTCATGGAGGAGGATAATGAGGAGT[C/T]CCCCGCGGATCGGTGCGTC |
| 20 | | 0 | GACAGGGTCCTAGAGG |
| MI07 | 4 | 23348135 | GATGTCTCTGGAAGAGTTCATCAGTACCAATTCAT[A/G]GTGAACATATTCATTTGGTA |
| 21 | | 5 | TATGCTAATACGCTA |
| MI07 | 4 | 23639153 | GGGAGATGCAGTCATAGCTCGTTCGAGGCCACCAT[C/T]GGGCGGGAGACGCAGTATC |
| 22 | | 3 | TTATGACTGATATTTA |
| MI07 | 4 | 23695995 | GTGCGTCCACTCTAACAACAACCTACAAGAACCCA[C/T]TATATGTATTATGGGGATAT |
| 23 | | 4 | CTAAAATGCTTGCAA |
| MI07 | 4 | 23778886 | GATTGGTTGCTCCACCCAATACATCCAGGCCCACC[A/G]CGTTCAGTTGACCGTGCAG |
| 24 | | 4 | TGCATGTGAATGGTTA |
| MI07 | 4 | 23815236 | TCTAGAACGACTGCTACTGTATTTTGGCAGATGTG[C/T]GTTGCATATTGCTACTGTATT |
| 25 | | 9 | TTGGAGGAGATTTT |
| MI07 | 4 | 23821987 | TTCAACAGGACACGATGGGCCTGAGCGCACCTGGC[C/T]GAGTAACCAATCACGCCT |
| 26 | | 3 | AAAGCTTCCAAAAATGT |
| MI07 | 4 | 23886345 | TTACCTTCATTTAAGCAGATCACCTTTTGCCAGAA[C/T]CATTCCAGAACAAGTAGACC |
| 27 | | 7 | GGAAACCGGATTAAG |
| MI07 | 4 | 23986892 | GACTAGCCGAGAAGGAAATGGAACGTGGCCGACTA[A/G]CCGAAAATGCGTCGTGGC |
| 28 | | 6 | CGCCCGCACCGGGAAGA |
| MI07 | 4 | 24003209 | CATGATAATTTAAGTAGGTGGTGGAATGACTTTAA[C/T]ATAGGGAAGAGGAGCTGGC |
| 29 | | 1 | ATCCAAGTGATGTCGT |
| MI07 | 4 | 24078533 | TGGTCTAACTCTTCATCGATGCATCTAACGGCCAC[A/G]AGCTCATCACGATTTTGCTT |
| 30 | | 9 | GAACTCAACGTAAGA |
| MI07 | 5 | 657550 | CTGGATCGGATTATATATCGTCTCGGCAGCTAGGG[C/T]GGCCAGCACCAGCCATGACT |
| 31 | | | CCTTCGCTTCTCCTC |
| MI07 | 5 | 1934320 | CTGGAGTCGGTTGATAATTACAGGCACATTGACTG[C/T]CCCCTTTACCTTTCTGCAGG |
| 32 | | | CGAGGTCGTACTCCT |
| MI07 | 5 | 2787807 | CAAGGTTAAACCCTATCCATTTATTCTACCCCAAC[C/T]ACAAGTCCACGACTAGCACC |
| 33 | | | AAGGTGTGAGACCCA |
| MI07 | 5 | 3992391 | CCCGATGATCCTGAGGTTCTGTGAATAGTTGTTAA[C/T]GCTGTGTTCTGATTTCAGGA |
| 34 | | | TGTACTTTTGCCGGA |
| MI07 | 5 | 4590005 | CTTAAGCAACTTGCATTTTTTTTATGTTGATCTAA[C/T]GATGCAAAGATTTTCTGCATG |
| 35 | | | CTTAGAGGGGAAAG |
| MI07 | 5 | 5642648 | TAGCAGCTTACGTTTACTTGTATAAGCAAATGAGA[A/G]GCACCAACAAACCAAAGTA |
| 36 | | | AGTCTGAATATATAAG |
| MI07 | 5 | 5797951 | TCTTATCTCACTTAAAGTTAGTTGAAAAAAATGCT[A/C]AGATAATGTGTCAAAAAGGT |
| 37 | | | GAAAGCCCATTTTTT |
| MI07 | 5 | 6334549 | CAGTCGCTGGGGGCAGTGGTATGAGGGTAAGGAGG[A/G]AGTTGGATGATTCAGTGG |
| 38 | | | TGTCATGCTATGATTCT |
| MI07 | 5 | 6375851 | TTCTGTCGCGGGAGCTATCCGTGCAAGTTCGTGCA[C/T]GATGAACGGCGCACCGAAT |
| 39 | | | TCACGAGACAGCTAGC |
| MI07 | 5 | 6931873 | CTGCACGAGTTTGAGGCAGAGGCTGCTTCTCCCCC[A/G]CAATTGGCGTGGCAAGGC |
| 40 | | | GGAGGCGGCATGTTGTC |
| MI07 | 5 | 7734869 | CGACGTACAGAAAATTACAAAAGAGATGTTTATCT[A/G]TGAGTCGAAACTACCTAGG |
| 41 | | | AGAATATTTCGCCAGT |
| MI07 | 5 | 10509121 | AAGAATCGCATTATTTGTCACATTTACGTGTGGAG[C/T]CTGAGTGGCCCATATGGCAG |
| 42 | | | ACAATACATCGGGCC |
| MI07 | 5 | 11402706 | GAGAGGAGAGATCGCGCAGAACTTTCGGATCGATC[A/G]GGCGCTCACCTTGGTGAC |
| 43 | | | GTACTCCATCTCGGCGA |
| MI07 | 5 | 11920659 | CATCGTACTGCTCCACCACTTACCCATACTTTTTT[C/T]GCTCTAAGTATCTTCTGGCCA |
| 44 | | | GTAAATTACCTCAG |
| MI07 | 5 | 15213441 | AACTGAGAAGTATGGCTTTTATGATTGATCCTTGA[C/T]TCCACTATGCTAACCCAACA |
| 45 | | | AGTGCCTAGTAAATT |
| MI07 | 5 | 16320899 | GCTCGCGATTGACTTGCAACATCCGAGTCCAACAG[C/T]GATGGAGCCTGAAAAAATT |
| 46 | | | AGGACCAAACCGTTAC |
| MI07 | 5 | 16667125 | ACGACTTGTTCAGTTTATTTTACGCGCGTGGGTTT[C/T]GGGTCCCCCTAACCTTGTTT |
| 47 | | | GTTTCGTGGATTTTG |
| MI07 | 5 | 17646466 | GACCGTGTCCCGTTTAATTATTTGTCCCATTCCAA[A/C]CTATGTGTGAACAACACAAA |
| 48 | | | TATAAAGGAAGGACA |
| MI07 | 5 | 19548622 | TTTCAGAGGCCGGGTTTCCTGGCAGGATACTGGAA[A/G]TAGCGGACCCGAACCTATG |
| 49 | | | GGCACACCTCCCTGAC |
| MI07 | 5 | 20034967 | CTCTCTATTTCCTCGCCCAGTTCTAAGATCTGAAG[C/T]CGTAGAGGGTTTCAGGCGAC |
| 50 | | | AACCGCATCCCACAG |
| MI07 | 5 | 20218664 | CATTGTCCTCACACGAGCACATGGATGATCACACA[A/G]CTTAGCACAGATGTCTTGT |
| 51 | | | GAGTGAAAACAGCAGT |
| MI07 | 5 | 22377052 | TGGAGACTTGAGAGTAAGATGGGCCCACGTGTCAG[A/G]AACCCCCCATCATGCCTAC |
| 52 | | | CCACTGCTGCATAAAT |
| MI07 | 5 | 22649947 | GGCACAAGATACTTTGTGTCAACTACTTGCGATTT[G/T]GTGCAAGACTAGCACAGGA |
| 53 | | | ACATGGAGTTTCTTCA |
| MI07 | 5 | 24882341 | ACAGTGACATCAAGCATCAGACAGGGAACCAGTGA[A/C]AAACAATGTACAACCTAC |
| 54 | | | AATGGCTAGGCTAGCGA |
| MI07 | 5 | 24971178 | AACAATCATTCCCTAACAGACCGAAAAGGAAGAAC[A/G]TTGCAGCCCTCTCTCAAA |
| 55 | | | ATTTGTTGCTACTTTAC |
| MI07 | 5 | 25417090 | ATTGTTGCGTTGTCATGGGCACTATTGCAGTCGAC[C/T]GTTGCGCTGGTAGCCGTTAC |
| 56 | | | TCTGCTGGGGCACCG |
| MI07 | 5 | 25817476 | GTTAAAAGAAGCCCGACCCTTTTTTATGCCTCGTT[C/T]GGTCGCTCATCATTCTTTAG |
| 57 | | | CTAACGAGGTGGTAT |
| MI07 | 5 | 27877780 | GGACGAAACCCTAGCGGTAATACCGAAGCTGTAAG[A/G]ATTTTCTAATTGGCAGTTA |
| 58 | | | TTGCGGGGTCTGTTGT |
| MI07 | 5 | 30431630 | CTGGCCTTGTTTCGGTATGCATATGCATCGTGGGT[A/G]GTACGGTTGGCTTTCTGACA |
| 59 | | | GCGAGATGAAGCTGC |
| MI07 | 5 | 30969873 | ATAATCAAATTTTTTAATCATTTGAACTGTGGCTG[G/T]TTGAATACTTGAATCTGTTAA |
| 60 | | | TTACTTTATGAATA |
| MI07 | 5 | 31132223 | GTAATCAATGTAAATGTAGAAGCTAAAGAGCAGAC[A/G]TAGAGATTGCAAACCCTTG |
| 61 | | | TGGATGCACTGATATT |
| MI07 | 5 | 33076387 | TTATGTGTTTAGTATTTAAATGCTTCTCCAACTGT[A/G]GCTATTGAAAATTTAGTTTTG |
| 62 | | | TTCTAACCAAAAAT |
| MI07 | 5 | 33461461 | CATAACAGTGTTATCTCAGCCCATAAAAGACGTTC[C/T]TAGTCTTACACCATTGCCTC |
| 63 | | | TTTTATTATCGATTG |
| MI07 | 5 | 34265898 | TTGCTGAAGAAAATGTCTTCATTGAGATCAGGTAA[C/G]TCAGCAGTTCCTGCATTTTT |
| 64 | | | TCCTACTCAGTTACT |
| MI07 | 5 | 34981843 | GGAAGCTTCTCGCTGGGGAGAGCCGGGACAAGCTA[A/G]AGCGACGGACATGGGTC |
| 65 | | | ACCAGTAAGCCACGGTCA |
| MI07 | 5 | 36698978 | GCACGCTTGCACCTAGGGACTGCTTGCATAACAGT[C/T]GTTGCACTATATTCTGATGC |
| 66 | | | GAAGATTTTTTTTTC |
| MI07 | 5 | 37085181 | GGAGTTGTCATGGGAGTTGGAACCACCTCCGAACT[C/T]AGGTGAGCGATTCCGAGA |
| 67 | | | GTTTCGTATCGAATCTG |
| MI07 | 5 | 39691300 | ATGTTCGCATAACGATAGCTACAGAGCAACAACAA[A/C]AAAAAAACGTTCCGATACA |
| 68 | | | TTGGCTTGATGTCATC |
| MI07 | 5 | 39897868 | AGCAAGCCATCAACTGGCTTAGTGACCATACTTTG[G/T]AACTCCTTCAAAGGTGAGG |
| 69 | | | AAATTTCACAAGATAC |
| MI07 | 5 | 40552455 | GGAGATATGTAATATTAAGTGGATAGAAGTGTTTC[A/G]ACAATTGTCAAAATTGCTTG |
| 70 | | | ACCGCTCGATCAATC |
| MI07 | 5 | 40670926 | CACGGCGACGAGGTACCACTCCGTTTTCGTACCAT[G/T]GGCAATATCATCGGTGCATC |
| 71 | | | TTCCCTGTCTGGGTA |
| MI07 | 5 | 42489567 | TTGGATCTTTTGGGCGTCTGGACACCCAGGCGACG[C/T]CTTTAAAACACTAGCCATA |
| 72 | | | GCGATAGATACACACA |
| MI07 | 5 | 42982239 | CATTTTGTGATCTGTTTTAACTTCTATCCTTCTTT[A/G]GCGAGGTTGATATATCCCTTC |
| 73 | | | TCAGTCTTGGTGTC |
| MI07 | 5 | 43772715 | TTTTCGGATAACATAAGGTTGGTTCTGCAAAGTCT[A/T]GGGCTTCGTTGTAATTAATT |
| 74 | | | ATTACCAATAAACTA |
| MI07 | 5 | 46832126 | TTAGGACGGAGGGACTAGAAGGAAAGATATATTGA[A/G]AGAAGACAAATGTCTATTA |
| 75 | | | AAAATAATAATGATAA |
| MI07 | 5 | 47148794 | GCAAAAGCCAGAGGCCGAGCTCACCAAAATGAGCT[A/G]CTCGTTGGGGAATTAAAA |
| 76 | | | AAATGAGAGGAGTAGAT |
| MI07 | 5 | 48904074 | TAGGAATGAACGAAAATGACGTGTGTAGTACGTGC[A/G]GTGCTTGAATACGATATGG |
| 77 | | | GAACAAAATCCAACTT |
| MI07 | 5 | 53459003 | GCTCACTTATGCTAGAGCCATTATTATAGTCCCCA[G/T]TAACAATTCTTTTGATTGTGG |
| 78 | | | TTCCAGCATATACC |
| MI07 | 5 | 53656341 | GAGTGAATAAAGTATTAAAAACACCTATAGATATC[C/T]ACTATACATACAAAATTGCA |
| 79 | | | AAGTATTTACATTAG |
| MI07 | 5 | 53901704 | TTATCTGCGTCGAGGGTCCTTGAATCGTGGCTGGC[A/G]AAGTCCTTTGTCTTGGCGC |
| 80 | | | TTGTCCCGTGCATGGG |
| MI07 | 5 | 55425948 | AACCCAAGTAGCCGCGCCGTCGTGGATGGAGAGAC[A/G]AGGGTGCGGTTCATGAAT |
| 81 | | | CATGAGTCCTGCTCCTG |
| MI07 | 5 | 55548348 | AATTTTACATATTGGTCATTCCTCCATTAATACTG[C/T]TGATCGCTCACTTGCTTTGTG |
| 82 | | | TCACGTTCTTCATG |
| MI07 | 5 | 56047845 | GTCGAGGTATCACTACATGTATCGGAACCGTCAGG[C/T]GGTCTCTTGTGTAAATATGC |
| 83 | | | GCTGAATAAGATGTG |
| MI07 | 5 | 57235134 | ACTAGTTTTGTAAAGTTTATATGCAGGCAAGGAAG[C/T]AGGGAGTGTGCTTTCTAGC |
| 84 | | | ATTTACGGTTTTGAAA |
| MI07 | 5 | 58621043 | ATTAGATGGGGCAAGAGAGTAGGATGCTAGGAGAT[A/C]TACGTGAAGACCAAGGGA |
| 85 | | | AGATATATGACCATTGC |
| MI07 | 5 | 60169328 | TTTTCCTTAAGAAGTTTTTTCCCATACTAAACACT[A/G]TGTCAACCACTACGATATGG |
| 86 | | | ACAACCCCTCCCCAG |
| MI07 | 5 | 60544505 | GTATTGGGTTTTAGTGATCGAGTGCATATGTAAGC[C/T]GGATACAGGGAAAAGAAAT |
| 87 | | | GAACAGCATAGAGAGC |
| MI07 | 5 | 61827491 | AACGTTATCCACAGATCTCAGCCGTCCGATCTAAT[A/G]CCGACGCTCCAGATTAAATC |
| 88 | | | ATCACTCTCGCGAAC |
| MI07 | 5 | 62623495 | GGGATGTTCACAGCTCCTTCAGGGTGGCCGGCGCT[A/G]AACTCGCCCTCCGTTCTAC |
| 89 | | | ACACAGACCAAATCGA |
| MI07 | 5 | 63667004 | CACTATCCGAGCATCTGAGTGTTTGCGAGATTGTG[C/T]GATTATGTGGTGCTAATAATA |
| 90 | | | TAGGTGTTGATGCC |
| MI07 | 5 | 64134193 | TTGACTTGTGATAACCTGGTGGTGATAGGAAAGTT[A/G]GGAGCAGCATGGGTACTGT |
| 91 | | | TGCTGGTATGGCAAGC |
| MI07 | 5 | 65992707 | TGGATGAAGTCGTCTAATCACTAGAACATCATGCT[A/C]AGTTGTTTTGAATATTGAAT |
| 92 | | | ATAAATTGTACATAT |
| MI07 | 5 | 66860524 | CAAATTTTTCAATCATTTTGCTTCCAGATTGAAAC[C/T]CCGAAGGATGTCCAACAGAA |
| 93 | | | GTTTGGGCGTACTGT |
| MI07 | 5 | 67852870 | AAAATTAAGTTTTGGTGCAGCTGCAGGTCAGTAAT[A/G]AGTCCTGGGATGTAAAGGC |
| 94 | | | AACTAAAATAAACTAA |
| MI07 | 5 | 69481320 | CTCTACTACATGGCAACAGTGATGTGGCTGACCCT[A/G]AAAATCATGCTGTTTTTTAA |
| 95 | | | TCATATCCTAGCCAA |
| MI07 | 5 | 70605990 | TGAGTGGTTCATGTATTACCAACCTAGGGAGGGCT[C/G]ATGCATAATCATGAATGAAA |
| 96 | | | TGCATGAGTTACCCA |
| MI07 | 5 | 71106594 | TCACTATTAATTTAAATGGTTTTCTTCATCCATAT[G/T]TTCTTGTATCTTATTCCTAGG |
| 97 | | | TGAGAATCATTAAC |
| MI07 | 5 | 71749089 | GTCTAGTTCAAAGACAGAAACAGCAGCATCACATG[A/G]CCAAGTTCTTATGAGAAGT |
| 98 | | | ACCAAAAATAAGCAGG |
| MI07 | 5 | 72568472 | GATGACCTAAGATGAGGTACTCGATATGCTACATT[A/G]AACTGTGTTCGATATGGTGG |
| 99 | | | TGAAGCTTGCCTCAG |
| MI08 | 5 | 73084362 | TCATTGTAACCGTGTGCTGACGAAGTGACGAACAC[A/C]CTGCTCACTGCAATTGCTG |
| 00 | | | CAGGAGGCTCTTTCAG |
| MI08 | 5 | 76250654 | CCACATGTGATCCCCATCAACGCATGCTCGCTCGG[C/T]CGCTCCCTTTCAAATTGCAA |
| 01 | | | GCCAAGCCGTCTCAA |
| MI08 | 5 | 77469219 | CACTTTGAAATGGCTCTTTCCGCGGCAAAGTACGA[C/T]GCAAAACTAGCAGTTGCGG |
| 02 | | | GCAAGGAAAAGGGATC |
| MI08 | 5 | 80224009 | ACCTCTTGTTAATTTTTTTCTAAAATATCACTACA[A/G]TGAAGCATTCCATAAAGAATT |
| 03 | | | TATAGGGTCCGTAG |
| MI08 | 5 | 81802084 | CTTGCCTTTGGAATCCCTCTAGACTGGGTTGCTGG[C/T]TGGCCCCAATACGGGTTGG |
| 04 | | | GCCTTGTCACGAACCA |
| MI08 | 5 | 82946410 | TTATTAAGCTTTGGGCCAATATATCACAATCCAAA[C/T]AGACCAGGATATCACAATCC |
| 05 | | | AAACAGACCAGGATA |
| MI08 | 5 | 84459929 | TATAAATACACCCAGTTACCATGTCGCTCTCCATA[A/C]CCTCAACACCCTGAGCCAAG |
| 06 | | | GCAAATCCCCACCCA |
| MI08 | 5 | 91893668 | ATACGCTCTCTCTATTCCAAAACAAGGCATTTGAG[C/T]TTTTTTAGGTACATAGTTTTT |
| 07 | | | CTATACATCTAGGG |
| MI08 | 5 | 92335501 | TAAATTCCAACATCTAAATACCTCCAAACAGTCCA[C/T]AAGATACCCCCTGCATTCTG |
| 08 | | | TTTTTGGACAGCAAC |
| MI08 | 5 | 93268903 | GAGATTGTGAGCAAGTGGACTGGTATTCCAGTGTC[A/G]AACCTTCAACAGTCTGAA |
| 09 | | | AGGGAAAAGCTGCTGCT |
| MI08 | 5 | 95753236 | GACATTACGCTTTTCAAACTGATTTCTACCCACTG[A/G]GAAAGGTTCTATGGCCCCCG |
| 10 | | | ACGGAGAGATTCTCA |
| MI08 | 5 | 95794884 | ATTTAAAATGATAAACACGACACAGAGGGAGCTTC[A/G]TCAAGATAGTCCAAGCAAT |
| 11 | | | GGCGAGGACTGGTATG |
| MI08 | 5 | 10163721 | GTTTATACAATTCTAACTAACAGTGTCGCAGCTCT[A/G]ACAATAATCAATGTAGTTGC |
| 12 | | 2 | TGCCCTCAGTTCTCG |
| MI08 | 5 | 10337171 | AGGCTCCTTCATCAACGTCTGCCGTGTGATGTCGC[C/T]AAAGCCTCTGCACCATCAC |
| 13 | | 5 | CGGAGAAAGCCCTCAG |
| MI08 | 5 | 10468973 | TCACCTGCGATCGCTCATTTGTAAAGAACAATTCG[A/G]TTATTAAGCTGGAGTATTGT |
| 14 | | 5 | TTTTCTCGGACAACA |
| MI08 | 5 | 11518649 | ATGGCCCATAATTTATTACTCAAAACCTAATCCAA[C/T]CCGACATGTCCAACAGTTAA |
| 15 | | 8 | GCACGAGCCAACCTA |
| MI08 | 5 | 12959523 | TATGAGCTGTAAAAAGCTGAGAGCTGTGGCGGTGG[A/G]AGTCACAGACGAGCGGAC |
| 16 | | 4 | GCCGCAATTGCCGATTG |
| MI08 | 5 | 13507400 | TGGACTTAAGTTTTTTTATGGTTCCGCTGTTTCCT[C/T]TCGATCTAGCTCTTCGCCTAC |
| 17 | | 5 | CTTTTTCTTGGCTT |
| MI08 | 5 | 13638979 | ATAGGGCCTGAATGTAGTCCTTTTAGAGTTTTGAC[C/T]TTCGTCTCTGCCACAATGGA |
| 18 | | 9 | GCCCTTCTCTTGATA |
| MI08 | 5 | 13696686 | TTCTCGATAGTCGGCCTATGTCCAATTACGTAGTC[C/T]GAATCCGCATTCTCCAGCGG |
| 19 | | 0 | AATCTCTGTACTGCC |
| MI08 | 5 | 13717707 | GGTTCTAGAACTCTTTGATGTTATGAAACGTTACT[A/C]TATTCTCATGATATCGATCTT |
| 20 | | 5 | ATGGATTAACTATT |
| MI08 | 5 | 13737696 | TTGCATGTTCGCTGGAATTTTTCCTAAGGACGGTC[C/T]GCCCCCAAACTCAGCCCAG |
| 21 | | 9 | ACGGTCCGCAATACAA |
| MI08 | 5 | 13981057 | AAATCATTTCTCGAAAAAAAAATTGTTTGCTGATA[A/G]AGCTTCTTCTAAATTCAGCG |
| 22 | | 5 | CGAAAGCTTCTAATG |
| MI08 | 5 | 14218015 | GAAATTGCTTCCCATGGTGTCGTTGTTTGGACTAG[C/T]GGTTCTAACCAACTAGTGAA |
| 23 | | 2 | ATGATGTCGCGTGCT |
| MI08 | 5 | 14320207 | GGGAAAAGGAACATTTCTCCTGTCTAATCAACGTG[C/G]TCGAGCGAAGAGATAAGAT |
| 24 | | 9 | CTTTCACATTGAAAAT |
| MI08 | 5 | 14629912 | ATAAGATTTGATGGTTACTTCGGAGTCAGATGAAC[C/T]TGTACTCGTTATTTATATTTG |
| 25 | | 1 | AAGATTTATATCGA |
| MI08 | 5 | 14811223 | GCTCCCGCGCAACCACCAACATAGCTGAGGGAGAT[A/C]GCGTGAGCGAGGCAGGGG |
| 26 | | 7 | CATCGGTGTTCGTCTAG |
| MI08 | 5 | 14953332 | CTTCCCTCGGCCGTCGAAGGCTGCAGACAAAGCAT[C/T]ATCTTTGGCCTTGCTATATG |
| 27 | | 9 | CCCCGAGTAGTTCGT |
| MI08 | 5 | 15146122 | TCCCTAGTTGTGTGTCTTTAAAAAAGGATTTTTTT[C/T]CTGTTTGAGCTTAAGCCTCT |
| 28 | | 8 | CTGATAAGGCATACA |
| MI08 | 5 | 15215381 | TATTGATCTTTAGTAATAGGTTGTGATGAAGTAGC[A/C]TACATCTCCTTTGGAACCCA |
| 29 | | 0 | AAATTTTGTGGTGTT |
| MI08 | 5 | 15215941 | CAAGGTGGAGATATAGGGGAGGAGATTTTGTTGTC[A/G]TGTCGAGATAGTGGGGCAT |
| 30 | | 7 | AGGGGAAGAAATATAG |
| MI08 | 5 | 15479721 | TTGGCGCATGCAGTGGAAACTAATCCCAAGATCTA[C/T]AGACACAACTATTTAAAGT |
| 31 | | 7 | GCGCACTGATCGAGTG |
| MI08 | 5 | 15509389 | CTTGTTGATGTGTGGAACATAGGAAAAAATGAGGC[A/C]AAAAGTGGATTTATATAAC |
| 32 | | 0 | AACAACCTACAAAGTA |
| MI08 | 5 | 15648538 | TAGGATTGGAAACAAAAGTCTAGCTGCCACAGCAG[C/G]GATGTCGTTCGGCCTGCA |
| 33 | | 1 | GAACCCACTCAACGAAG |
| MI08 | 5 | 15915314 | TTCTGAATTGTTTCAGTACACGTACAAGTGTGTTT[G/T]TATAACTTGTTATTCAGTTTG |
| 34 | | 4 | TGTAGTGTGCTCAC |
| MI08 | 5 | 15937144 | TCCGGTAGCCGTCGCCAGGCTGCTGTGAGTGTGAC[C/T]GACCTTCGACCTCGATCGC |
| 35 | | 0 | TAAGTGGTTGCGGTAT |
| MI08 | 5 | 16281696 | GGCTCTAACGAGGACTTAGGAGAAGCCTAAGATTC[A/C]TGATACCTCGATAAAATAC |
| 36 | | 9 | CAAAGTCATTGACGAG |
| MI08 | 5 | 16316023 | CGTCATTGTCCTGCTAATTTCGTAGCGTTCATTGT[C/T]TTTGTATTCATATGTTAGCAC |
| 37 | | 9 | ACATGCTTCTTCAG |
| MI08 | 5 | 16469579 | TTGGTCGGCTACTCTGGTCCTCTGGTATCCAAGCG[C/T]CAGACTCAGATCCCTGCAG |
| 38 | | 0 | CCACAGCCCGTGTGTC |
| MI08 | 5 | 16728180 | GGCAGTAATGTACTGGTTTCCATCTAGCTACGTTA[G/T]GCATTTACTGCTCAAGTCATT |
| 39 | | 9 | CATGCTTTTACTCA |
| MI08 | 5 | 16746753 | GCAATGCAAATCGATGGTCCAAAGAATTTACTAGA[C/T]AAGAGATAGAATATATTAGA |
| 40 | | 3 | TTTCTTATGTTGTCC |
| MI08 | 5 | 16751165 | CTATATGCTGGCTGGAGGAATTTGTGATTGATGCC[A/C]ATCTGATCAAAGTTATGTTAG |
| 41 | | 8 | AAAGTTATGTCGGC |
| MI08 | 5 | 16887925 | TTTCTATGATCCACCTTTTGATAAATTTGACACAT[A/G]AAGATCAATGCATTACATAGA |
| 42 | | 6 | TAATTATGTGTCAC |
| MI08 | 5 | 16889323 | AGCACTTGCCTTGTGCACTGTAGTTAGTCTGTTGC[A/G]TCATAGCCGCATCGACCATA |
| 43 | | 6 | GCTATACATGTATCG |
| MI08 | 5 | 16928023 | TTTAGAGCTCCAGTTCATGACTGCATCAATGGTTC[A/C]TCGTTAAACTTTGATTTATG |
| 44 | | 0 | GGTAGCATTGGTCTA |
| MI08 | 5 | 16995685 | AGGTGTCAGAACATGCGAGGAAACCTAAGGGTCAG[C/T]ACGTTGTTGTAGTGGATG |
| 45 | | 6 | GCTCTCCTCCATCCTAG |
| MI08 | 5 | 17192219 | TCGACTGACTTGGGATCCATAGTCACCTTCTATGA[A/G]ACTCTCTGAACCCTCAACCT |
| 46 | | 2 | AAAAGGAGAAAAAAA |
| MI08 | 5 | 17278585 | TGAGAAATGGACTATCTTCGCCTGCAGAGGCATGT[C/T]ATAAAAAAGTGGCTTACAT |
| 47 | | 2 | GCTGGTCCATTTTTAA |
| MI08 | 5 | 17384621 | GCTGCCAATTTGGCGAACAAGCCAGCCGCAGAGAC[A/G]TTTGCACGCGCCACTTCA |
| 48 | | 4 | CTCAAAGATCCATTTAT |
| MI08 | 5 | 17411663 | GATCGTCCTCATTATCTGCCACCTGATTAGCCTCG[C/T]CATCTGCCGTCTGATCTACAA |
| 49 | | 5 | CTGATTGATCTAAC |
| MI08 | 5 | 17419522 | ATCCTCTTGTTCCTCCCTCCGAAACCCTGGCAAAA[A/G]GAGGGAAGGAAAAAAAAA |
| 50 | | 1 | TGTTTCCAAATGCGATT |
| MI08 | 5 | 17445671 | TGAACACATCAGATTCCATATTTTTTTGTTTTGTC[C/T]CGTTGACATAGTGCTTTCTTT |
| 51 | | 5 | CTTATGCCAGAGAA |
| MI08 | 5 | 17575164 | CCATGACATGTATATGCGGGCCGTAGCCCTAAAGT[C/T]CTGGACGGCCCATAAATCCC |
| 52 | | 8 | AGGTCTTGCCCCCAG |
| MI08 | 5 | 17608256 | ATGCATGCACGCCATTAATTCGTGGCTTCTGCCTT[A/C]TATTTATTCTTCCCATGGGCA |
| 53 | | 7 | TGGCCTCCAGAGAG |
| MI08 | 5 | 17608275 | CCCTCTTGTACGTACACGGCAGTTTTAAGTGAGTT[C/T]TCTTATCCCTGTGCTATCTGT |
| 54 | | 2 | AAATACATACTTTG |
| MI08 | 5 | 17615879 | AGCATTATTTCTCTAACGCATTGTTGGAGAGAAGA[A/C]AGGACGGAACTTCGATAAT |
| 55 | | 7 | CGGCAAACTTGACACA |
| MI08 | 5 | 17802428 | AACTAACCCCTAGTGCTAGCGCACGGTGTACGAGA[A/C]CTTGGGGTGCTTTCTGCAT |
| 56 | | 1 | GAGCGTGGACTATCTG |
| MI08 | 5 | 18199328 | GACATTTAGCCTTGATGGTGGCTATGTTTTTTTTT[G/T]GTTTATGCATTACAACAAGTT |
| 57 | | 5 | GAAAATTGATGATG |
| MI08 | 5 | 18208990 | TAAATAAAAAGGAATGAAATGGCAGCGCAATGCAA[C/T]GACCACCAGTTATTCGAAT |
| 58 | | 7 | AAAGACTGCGTTTGGC |
| MI08 | 5 | 18258887 | GTAACATCTTTGCCTGGAATGATATAACAAAAAAC[G/T]TATAAATGTGTGACCTAGAA |
| 59 | | 8 | ATTGTAAAGAATTAT |
| MI08 | 5 | 18411425 | CTTATATTAATTGGTGGTTCCAACCAATACTAATA[C/T]CCCTTCTTAGAGCATCTCCAA |
| 60 | | 2 | GAGCTCTCCATAAA |
| MI08 | 5 | 18428274 | TGCTAGGCTGGACAGATCTTCCACACCAATAGCTA[A/C]TAATCATTGGAAAAAGTTG |
| 61 | | 5 | CAACAGATCTGCAATC |
| MI08 | 5 | 18454278 | CTGCTTTTGTGAACTTTGTCTAGCTGTATGTAGAC[A/G]GTTTATAGTTGTGTTGTGGC |
| 62 | | 5 | CTGAACAGGTTGTTT |
| MI08 | 5 | 18725134 | CCCACTTTCCACCGCAGTCACTGCACGAACGCACA[A/G]GACCAAAACAATTTGCAT |
| 63 | | 9 | CAAGAACTGAACTAAGT |
| MI08 | 5 | 18925120 | GCTTGCGCCTGGTGTGGTCTGTGGCTAGCTTGCTG[C/T]CCCACCGGCACAGCGTCGT |
| 64 | | 9 | ACAGACGATACAGCTA |
| MI08 | 5 | 18925303 | AGCGACACGTAATGCAAATAGCAACATAAACACAC[A/G]ATCTCATTTGATATTTTTTA |
| 65 | | 9 | TGTTAAGAGGCTAGG |
| MI08 | 5 | 18996203 | CAACTTCTCTATCAATGATGCTACTACTTGGTGGG[A/G]CTCGCTATAGTTAGCGACTAT |
| 66 | | 4 | GACTTCCCTCTTCT |
| MI08 | 5 | 19026233 | TACTAATAATTTCCATAATGAACAAGGTAAAACAT[A/G]GATGGGTGCAATTGAGCAG |
| 67 | | 3 | ATCACAAATCCAGCAG |
| MI08 | 5 | 19117217 | ACTTGCGTTTGTAAGGTGATAGATGCCTAGAAATT[A/G]GAAATGAAAGCAACTGTAG |
| 68 | | 2 | CTATTAGCTAGGTAAC |
| MI08 | 5 | 19118305 | AGCTAGGTAGCTAGCGACGACCTAGCGTATGTAGG[G/T]AGGGAGGGTCGCGGCTGG |
| 69 | | 7 | AGCTGGATTGCGAGGCG |
| MI08 | 5 | 19226106 | AGCATAATGCAAGGTCCCTTGGACGATGGAGGCGA[C/T]GACGTTAACATTGTCTCTA |
| 70 | | 8 | ACGCTCGCGATATATA |
| MI08 | 5 | 19248240 | AGGGAGACCCTGATTGGCACGGACGGCCACCGCCG[C/T]AACCAATCATTCCTCGGC |
| 71 | | 1 | CTCCCAAACCTTCATCC |
| MI08 | 5 | 19378636 | AATGGAAAGAAATGAGGTAGTGGGACCACCATAGA[G/T]GCATCAACCGACCATGCTT |
| 72 | | 0 | ATGGATCCACCAGCCT |
| MI08 | 5 | 19487615 | GGATGGCTTAACATATGATAATAGTACCATGTGGA[C/T]AGCTGACTGCAGGTGCAAA |
| 73 | | 1 | AGCATGGTGTTTATTG |
| MI08 | 5 | 19554183 | GGTACGTCCGTTAAGAACCCTCGAGCACCTACAAT[C/T]GACCCAATCAATCTACATAT |
| 74 | | 1 | CATTTCCTTTACTTT |
| MI08 | 5 | 19559687 | TATACGACACGGATTGCTGACTGCAACTTGCACCG[C/T]TAAACAAGGCTAGCTTGAC |
| 75 | | 4 | ATGGTAGTATCCGGCA |
| MI08 | 5 | 19716833 | TCGTTTCTAAGGAAACTCAGAAGCACAAGTGGCTC[A/G]AATTAATGATCCTCATGTC |
| 76 | | 4 | TCACCAAATCCTTCAC |
| MI08 | 5 | 19836790 | TGGCTATAGGTGTCGGACCGATTCTCTTTCCCGCT[C/T]CTTCATGCCAGTTGTGGTCA |
| 77 | | 2 | TGCAGCCTGTACTTG |
| MI08 | 5 | 20247553 | CATGAGTAAGATCGTAACCGACAAACCGTGACATT[A/C]CTGGCGGTTTCAACAAACA |
| 78 | | 1 | CAACAGGACAATTCAA |
| MI08 | 5 | 20317286 | GGGAGCTTCACGTTATGGGAAAGCAAAGGTAGAGT[A/G]GTTGGCTACATCTATGAAC |
| 79 | | 3 | AATCAATGTTAATCAT |
| MI08 | 5 | 20488668 | ATTCTGCTGTAACTTATGTCACGGGTCGTCCTCTC[A/G]GATATGCCGGATAAAAGGCT |
| 80 | | 4 | TATGTGCGCCACCAA |
| MI08 | 5 | 20496060 | ACGGTGCTATGATAGAACAGGTAGGATTATCCCCG[C/T]GTCTACTTTGATGATACCGC |
| 81 | | 8 | GTGCCAAATCACGGA |
| MI08 | 5 | 20520730 | ACTGTACCTAGCAGTACTTTTACGGCACCCAAAAT[C/T]TGCGCAAACCCGATTCGCG |
| 82 | | 3 | TGTGTGGACAGTTTTC |
| MI08 | 5 | 20609050 | TCTAGTGGAATTGGAATACAGCACCAGGCAGCAGC[C/T]GAACTCAACTTGGAGCCG |
| 83 | | 8 | ATTGCATAGATTAGCAA |
| MI08 | 5 | 20778095 | TAATATAACTGAAGATAGTTCAGTTAAGAAGTTTG[A/C]CTGCTCATAGCAGACATTAA |
| 84 | | 6 | GGAAAATACCTGTTC |
| MI08 | 5 | 20840089 | AGAATTGATGGGTGCAGTGCAGAGTGCAGACGATA[C/T]GAGTGTGAGCACACAATT |
| 85 | | 3 | AAGTTTGCATGGGAGAA |
| MI08 | 5 | 20860080 | ACAAAGCATAGGTACTACACAATCGACCTACACGC[C/T]GAATGAGCCCACTAGCCCA |
| 86 | | 5 | TATATGCCTCCACAAT |
| MI08 | 5 | 20879969 | AAACCTAAACACACCGCAAAAAAGGTATCAAGCAT[A/C]AAAAAGGCAAGGTGGGT |
| 87 | | 5 | GAGCACATAGGAAGACAA |
| MI08 | 5 | 20884922 | GTGGTCATGCCTGTCTGCTTTCAGGACGGCATGCG[C/T]AGGCTATTGTCGCGATCTTG |
| 88 | | 6 | GGTTCGATTTGGTGC |
| MI08 | 5 | 20893865 | TCTGCGCTAGACCGAGTCCGAAAGCTCCCTCCGCT[A/C]CGCAGCTGGTCGGTCTAAA |
| 89 | | 3 | CTTGCCGTCTCCGTTT |
| MI08 | 5 | 21158765 | CTCTACTATGTAAACAATGTAGTTTATAGTACAAA[A/G]GCAGCAAAACAATACTTTAC |
| 90 | | 1 | ACAAACTTCTAGAGA |
| MI08 | 5 | 21222792 | AAACCACCTTATGTGAAAACATTTTACACCAAAAA[A/C]AATACTCTACATCAGATTCT |
| 91 | | 3 | TTTACCAATGATATA |
| MI08 | 5 | 21334091 | CGGCTGCAATCAACTCTTCAGCAGCATCTTTTACC[A/G]CTGCGCCTTCTTCTGTACCT |
| 92 | | 1 | TCAGGAGCTTTGGTT |
| MI08 | 5 | 21358676 | ACAGGCCACTACGTCCCCCAGTTGGCAAGGAAGAT[C/T]GTCGAGTACAACGAGGCC |
| 93 | | 1 | TCGCCTCACCCCTTCAT |
| MI08 | 5 | 21630149 | GCTACTGTGCCATGGTAAAACCGAGTGTTTTACCT[A/G]CGTTGTCCGTATGCGTCTTG |
| 94 | | 3 | GTCTCCCAATCGTCT |
| MI08 | 5 | 21679601 | TAGAAATCCTCGGCACACGCTGGGTCGAACCAACA[A/G]CGGACATAATTGGACTTTT |
| 95 | | 6 | TTATACTACAAACTGA |
| MI08 | 5 | 21759580 | ATGTTGCTTTTGTTGAGTGACATAACTTGGATCTC[A/G]CTTTTGTTGAGTGGCATAAA |
| 96 | | 0 | ATCCAACCAGTGCTA |
| MI08 | 6 | 1537980 | ACAACCCATCCATCGATTCTTCAAAGCTACCAGAG[C/T]AATGTATACCCCCTCCCTCA |
| 97 | | | GAGGAACAAAAGTAT |
| MI08 | 6 | 4803062 | CAATCAATTTCAGGCTCCACTGTTGCCCAAGATGG[A/C]CGCTAGACCTTAAGTGTCG |
| 98 | | | CTTAGGTGCTAGGCAG |
| MI08 | 6 | 4846717 | ATCACTTCTTTGCTTCTGCAACAGGTCTTCTTCGG[A/G]CGGGATATCGTAGTGAAGGA |
| 99 | | | AGCCCATGTAGAGCG |
| MI09 | 6 | 5870567 | TAGGAAACAGAAATTAGAGGGCACTGAGTAAGATA[G/T]CAATATCCAACAGGCGTAA |
| 00 | | | GCTGATTACTTCTTGC |
| MI09 | 6 | 7161363 | AATCTCTAAAGAAGGTTAGTGTCTTTCTATCTGAC[A/C]TTTGGTGTCTTTCGTTCATAA |
| 01 | | | TTTCCCCCCTATTT |
| MI09 | 6 | 8281009 | ACGCACTATGCCCGGGGTTAGAGTTATAAATAATT[C/T]GGAGTGCGGAAGATAGTTCT |
| 02 | | | CCTTGCTAGGAGTTG |
| MI09 | 6 | 9190630 | CCTGCAGGCTCTAGGGCCATAGGAAAGGAAATGCC[C/T]CGAGCCCCTGCCAGACTC |
| 03 | | | CGATAAACCATCTCCTC |
| MI09 | 6 | 9914853 | TATGGTACCAATCCTTCGCTTTTTCTGCCCATCCA[C/T]GTTTTTTGCAGCCGAAGGCT |
| 04 | | | CCTCTTTCTTCTGTA |
| MI09 | 6 | 13019148 | AATAGACAGTATTTCCTATAAGGAAAATAGTGAGA[C/T]AGAGAGTGTGTGAAATCTG |
| 05 | | | CCAGGTTGGGCAGGGC |
| MI09 | 6 | 16802233 | GGCTCTCAGGCAAGAGGTTTATCTATACCTTTATG[C/T]AGCGATGGATCCAGCCTCTC |
| 06 | | | AAGGCCTGCCGGAAC |
| MI09 | 6 | 17956521 | CTTATAGACTACATGTACTTTCATACCATAAACAC[A/G]ATAAAAAACTAAAACATAAC |
| 07 | | | TATTGTACATGGTTT |
| MI09 | 6 | 23162906 | AGTTAGGCAGCAAGCGACCTTCAGCTTTACAAATT[A/G]GTACACATGTCCTTCAGCT |
| 08 | | | TGCATTCAGTGTGCAT |
| MI09 | 6 | 23829343 | TCAGATTACTCACTTTAAATATGATGAGAAAAAAT[A/G]GATATGAGAACCATGAGTAT |
| 09 | | | ATGAAGGATCGAATA |
| MI09 | 6 | 24313682 | GTGGGGAGATGGCTACATTAATTACTGTATAGTAG[C/G]AGCTATTCAAGGGACACGA |
| 10 | | | AAGGAGGGGGGAAATA |
| MI09 | 6 | 24552959 | TCAGTAAACATTTGGTTTGCATATGACTATGAGAG[A/T]TTGGTACTGTATTATCTCTGA |
| 11 | | | CAAAAGAATGGTAA |
| MI09 | 6 | 24601477 | ATTGGAGAAATTATATTAGGGTAGGATACAACACG[A/G]GATGACCTAGTTAGGAATAG |
| 12 | | | CCTAACCATAGTTAA |
| MI09 | 6 | 26228933 | GGGGCCCTCGCGTAACACCACGCCGCACTTCGTCT[A/G]TATCACTTACGTGTGGGAC |
| 13 | | | CCACCCGTCAGGGTTT |
| MI09 | 6 | 26667965 | CCCTTCCTTCTTTCCCGTTCCCGGGCTAAAAAATA[A/T]TTGCTAATCACAGCAGGGAC |
| 14 | | | TGAGGGACAAGCTCG |
| MI09 | 6 | 31309851 | CCTCCGCCCCCTTCTCTGTTTCGTAACCGGTGTTG[C/T]GATGCCCTCTGCTCAGTGAC |
| 15 | | | AAACTCCCCGCCCGT |
| MI09 | 6 | 37900870 | CCATCCTCACGGCGGCGCGGACCACGCCGGTGGCC[A/G]ACTCATGGTGAGCGTGAT |
| 16 | | | ACCTTCACTTCACTTTC |
| MI09 | 6 | 38769809 | TTAAAATGCAGGTACGTGAAAAGCATCAAGGTAAA[G/T]ATCGAGGGGTGACAAGGG |
| 17 | | | TTAAGGTGATAACAGAC |
| MI09 | 6 | 38780600 | TAGAAACATCATAAATGGAACCAACATCATCATCT[A/G]TAACCAAATCCATAAATAGA |
| 18 | | | ACCATAACATCTCGA |
| MI09 | 6 | 39077982 | AGAAATTTATTTACATGAAGATAGGTAACGTGAAG[G/T]AACGGAAAAGACCCCGCCT |
| 19 | | | TCTTTCCCTATTTGAC |
| MI09 | 6 | 41632602 | ATACAGAGCAATCAATTTTAGTTTAATGAAAGACA[A/C]AGCTGCATCTAGAAGAAAA |
| 20 | | | TAATACAGTGAGTAAA |
| MI09 | 6 | 48011626 | AGGCTGACCAATCCAGCAGGGGGCACATATCTACA[G/T]CCACCAAGATGACGACAA |
| 21 | | | AAGGGGACATCATCAAA |
| MI09 | 6 | 54018121 | GTTCCAATCCCAAAGGACTTTGCAGCTTGAATGGC[A/G]GAGAATCAGTCATTACCTT |
| 22 | | | CAAAATTTCAACCACT |
| MI09 | 6 | 55751842 | AACTTCATTCGAGAGTTTTAAGATGCATGATTGCG[A/G]CATCTTTTATTCTTGAATTTC |
| 23 | | | ATCTATATCTATCC |
| MI09 | 6 | 58605917 | ATGCCGATGAACCAGATAAGGCCACAGAAGATGGA[C/T]ACGACCCAGAGGCCAGTG |
| 24 | | | AGCTGGTCAGTGCGCCG |
| MI09 | 6 | 59285267 | TCTCCGAGAGAAACTGAAGGGAAGCCGGAAGAACA[A/G]CAATGCTAATCTTGTAGG |
| 25 | | | TCAGGCATCTCGCCTCC |
| MI09 | 6 | 61173229 | CCTATTATGGGGTATGGCTCCGATCCGATGCCTCG[A/G]GTTCAAACCTATCCGTCCGG |
| 26 | | | TGTCATCGGTAGATA |
| MI09 | 6 | 61456996 | CAGCCCCCCCCTAAAAGAATCTCGTCCCGAGATTC[A/G]GAGCGAAAGATATTCAAGA |
| 27 | | | GTAGAGAAGCATGTAA |
| MI09 | 6 | 61836439 | CATCATCCTTCGGTTCTGGAATTATCTCTTCACCC[A/G]TGAACCTTATCAAGTTGTCAT |
| 28 | | | CATTCTTTCCAAAA |
| MI09 | 6 | 62022407 | AACCATAATGGATCCTAAGCAACATGAGCTTGCAA[C/T]CACCCGATCAATGATCTACG |
| 29 | | | GTCAACGTAGATCCC |
| MI09 | 6 | 62347165 | CCCTTCACCGCGCCGTTATGGTCACGGGTATTACT[G/T]TTGATATGCTGTCCCTGCTCC |
| 30 | | | CCAGCAGCAGCAAC |
| MI09 | 6 | 63302866 | TAGGTTCGTCCATTAGCTTCACCAGGCAGAGTAGT[C/T]CACCCGTTACGTCATCTTGG |
| 31 | | | GGTCGACTTGGCTCG |
| MI09 | 6 | 63473038 | GCACACGAAATTTCTCGTTGGAGACAAACTCCGTC[A/G]TGGACCTACTCCGCACCGC |
| 32 | | | GGGCCGACCTCACCAT |
| MI09 | 6 | 65458137 | CCCTCCTGCTTGTTGCTCAGCAGTTGCTGTCTAGC[C/T]TGCAGTATGCATGTACTGTT |
| 33 | | | TCACATGCATACTAC |
| MI09 | 6 | 65659738 | AGGAAATTTTTATGGCTTTGATCTCGATGGCACTT[A/G]GGCAGGAGCTTATGGGATGC |
| 34 | | | AACTGACCAGGCATA |
| MI09 | 6 | 66803432 | GTAGTTTGTAGGTGTGCAATACAATGACGGTGGTC[A/G]ACGGTGAAGGTGAAGATCA |
| 35 | | | TGCGAGCTTGTGCAGA |
| MI09 | 6 | 68945381 | TGCTGTAAAAATATCAAGGCCAAAAGGAGTGCTTT[C/T]GCAGTTTGAAGCATAACTG |
| 36 | | | TATTCCCTGATCCCTA |
| MI09 | 6 | 71303851 | CCATTGAAAAACCATTTCTTCAATGTGGTGATCCT[C/T]GCTTGAGTGTCATCTAGATA |
| 37 | | | AGAATGTTAAGATCA |
| MI09 | 6 | 73696655 | CCGGTATTCGCCACGACCCAGGGCAGTACCTCGAC[A/G]AAGAACCGTGCACCATCG |
| 38 | | | TCGTCCGGTGTCCGCCG |
| MI09 | 6 | 75292286 | GTGGAGGCCTGTGAAGGTATTTCCAATATGAATGC[A/T]GTTGTTTAAGGGTTATAGAA |
| 39 | | | TGTAGATATAACTTA |
| MI09 | 6 | 75557018 | CGGCTAGGATCACAAATGTTTTACGTGACAGAATA[A/C]CAGTATCTAGCCATTTTAGC |
| 40 | | | CTCATGTCGTGGTCT |
| MI09 | 6 | 76848126 | CCCAAACAGAACATCTATCTTTGAGCTATGTTTTC[C/T]AGTTCGAACCATCTTCCACC |
| 41 | | | ACTGTACAACGAAGT |
| MI09 | 6 | 76869501 | TGGGAAACGACGACGCCTCAAGGCCTAGGATGCAA[C/T]AGAGGAGCAAGCTTCCCA |
| 42 | | | CACCACCATAGCGCACT |
| MI09 | 6 | 80166847 | CGAGAAAACATCGTGTCAATGGTCTCTCTAGTCAA[C/T]TAGACAACGTTCTCGTACT |
| 43 | | | CTCGCAGGTACATCTC |
| MI09 | 6 | 80444365 | GCAACAGCGTCTTCTTCATCGGTCCGCCGCAAATC[C/T]AGCCGAATTCGATCTTTCCC |
| 44 | | | AATGGTGAATCATAA |
| MI09 | 6 | 80673195 | GACTATGAATGTTAACGAAGACAAAGGTGTGCCAG[A/C]TATAGCTTCGGCTCCACAT |
| 45 | | | ATCTCGATTAAAGAGT |
| MI09 | 6 | 81837501 | AATGAACAGTCAAACATGGAAGTTGTGGATGACCG[A/G]CAAACAAGGGGATGCGAG |
| 46 | | | TGCATATTGAATAAAAA |
| MI09 | 6 | 82183292 | CAGGATGTTTTTTGAGGAGGCAGAGAGAGGGGTAA[A/C]TGAGCTCTCACAGGCTAG |
| 47 | | | CAGATGGCCAGTAAGTC |
| MI09 | 6 | 83130638 | CTCCTGATCGAGAAGGAGACCGTGGACGGGGAGGA[A/G]TTCATGAGCTTGTTCATT |
| 48 | | | GACGGCCAGGCCGAGCT |
| MI09 | 6 | 83386135 | CTCCTTCGAAAAGAAATGAAATGATGCCTCCCAGC[A/C]GAAGAAGAAAAACATCTC |
| 49 | | | ACGCCACGCCTGCTCCA |
| MI09 | 6 | 84102096 | ACTTTCTGGCTGTGCATTTCCAAGGGCTGGTTGAT[A/G]TGTGATCTTGTAGTCTCTGT |
| 50 | | | GTTGTCGTGCGCTTG |
| MI09 | 6 | 86279943 | AAGGAAATATTTCAGTGGCTTGCAATTGCAATGAA[C/T]TTTGTTGATAAAATGTTGCT |
| 51 | | | TTAATATTATATTTG |
| MI09 | 6 | 86618275 | CTTGGACAATCATGATAAAGCGAAAGGGATCAATA[C/T]CAGATGTGCAACAGGTGTT |
| 52 | | | TTCTAAGTCTGAGCAT |
| MI09 | 6 | 88752794 | GTATGCTGCACGAGCACGAGTAAATACTACAGGCA[A/G]CAAGCAACTAGACAGACT |
| 53 | | | TAATCGCATCTCAGCCA |
| MI09 | 6 | 88861513 | GATTGTCAGACATGCAGATCGGTTAGAAACTTAGA[A/G]TGTCAAACCATTGGCATGC |
| 54 | | | TGCAGTTGCTGGATGG |
| MI09 | 6 | 89567007 | CCATTGTCCCAAGTCTTCCATCTGGCTCCAATTAG[A/C]CAGCGCCAAAGCTGGTGCC |
| 55 | | | TCAATCCATGAAGCCA |
| MI09 | 6 | 91404838 | AAAAGGATAACAAAATATTGTATAGTGCAAATTGT[G/T]TTAAGCGCACACTGGGAAG |
| 56 | | | CCACTGAAATAATAAA |
| MI09 | 6 | 93556797 | GGTAGGTATGGAGCACATACGTATATACACGCCCA[C/T]GGTCCGACGGTTTCTAGCAG |
| 57 | | | AAAAACCTTAGAATT |
| MI09 | 6 | 94911456 | ATGGAAATTGCCCTGTCTCGGTGACTCAAAATCCG[A/C]TTTAGTCGTCACCGATATAT |
| 58 | | | ACTAATTTGAGGGTG |
| MI09 | 6 | 95480976 | TGGAATTTTGGGCAACGGTTTCGTTTTTATCAATA[A/C]ACATTGATTTAACCGCGGTC |
| 59 | | | CATTTCTGGCCCATC |
| MI09 | 6 | 96335930 | CCAAGCTAGTGAGCAACTATACCCGACCATGACAT[C/T]GGAGGCTAGGCTAGCAAGC |
| 60 | | | CCATCCATGTTGGTCA |
| MI09 | 6 | 97779031 | TCACGTTTTGTTTCCGTCCGTCACCTGTAAATGAC[A/G]TTTGACATGTACTATAGGGT |
| 61 | | | TCGGAGTGTACCTGG |
| MI09 | 6 | 97872003 | ATGAATCTGCTATCTAAAAGATGATGTTCTAGATC[C/T]TGGATTTCACATTTTGACTGT |
| 62 | | | TAATGAAGGCTCAA |
| MI09 | 6 | 10030681 | CAGGTGTACAAGCCACAACCACAAGTCGTCGTCGT[C/T]CAGGCTCGACTCGAGGTC |
| 63 | | 7 | GAGGGAGAAGCAACTCC |
| MI09 | 6 | 10036647 | TTATTATGATATTTATAATACTGGACCTAAACAAA[A/C]CTCAGGAAGTACTAAATCAAG |
| 64 | | 4 | TCAAAACTCTCTAA |
| MI09 | 6 | 10275796 | AATCTTGTGTTGTCAATCCATATAAAATTTGAAAA[C/T]TGGTGGCCCAAAATTGAAAA |
| 65 | | 0 | AAAAGATTGACTTAG |
| MI09 | 6 | 10310041 | TATCTGTTGGGTGGATAAGATCAGGAACGAGCTAG[A/G]TGTAATCCTGCGGTTAGAA |
| 66 | | 9 | TCATTGTCTCCTATCT |
| MI09 | 6 | 10313338 | GGCCAAGTTGGAATCTTTTTTGCTGCCGTATAGAA[A/G]CGGGAGAGCGACGCGGATG |
| 67 | | 9 | GTTGTGGGAATGTGGG |
| MI09 | 6 | 10551017 | ACGTACGGCACAAGATTATTAGCTCACCAGCAGCA[A/G]GCTGAGCACGGCAAAGGA |
| 68 | | 0 | TTAGGTCAAAGGAAAAG |
| MI09 | 6 | 10560117 | GAAGGCAATCTCTTTCGCTCGCTTTGCGATGGTGA[G/T]GGCGCTCTCCTAGAGGAAA |
| 69 | | 5 | TTAACAAAACTGTATC |
| MI09 | 6 | 10705530 | TGCAAGCTGGCTACTAATACTCTACACAAATGTAC[A/G]TAACTATCTATCTGTTTTTAC |
| 70 | | 7 | TCTCACCTAAACCA |
| MI09 | 6 | 10718187 | GAAAGTGGGCTGGTCTAGGCAGCACTGTACAGTCT[A/C]GTGCCACCCACCGGACAG |
| 71 | | 5 | TCCCGGTGTGCACCGAA |
| MI09 | 6 | 10739028 | TGTGCAAGGTAATCCAAGAGAGACCATACATAGTT[G/T]GGAGGAAAAAAAACAAAT |
| 72 | | 7 | AAAAAGCACACGAAAAT |
| MI09 | 6 | 10792673 | GGAGCCCGTGACCTCGACCTCGACCTTGATGTACG[A/C]CGCAGTTTCTTGTTGGATT |
| 73 | | 7 | GCTGGCCATCTATCTC |
| MI09 | 6 | 10823190 | TTCCTTGATTATTACACAAACATTAGTAGTATGTG[C/T]CACTTCTTCGAGAGTTATGTT |
| 74 | | 5 | AAGTGAAGTTCGGT |
| MI09 | 6 | 11007437 | CGAGTTCATGCGCCTGAACGTTGTTGATCTCGAAC[G/T]ACCCTTCGTCTTGTATGAAC |
| 75 | | 1 | TCCATCACCTCCCTG |
| MI09 | 6 | 11119645 | ATTCTGCAATTTTTCTGTACATGCCATTTTGATCA[A/G]CTTGGCTAACGTCTGAAACA |
| 76 | | 4 | AAAACTCACCAAAGC |
| MI09 | 6 | 11132181 | TCATGGTCTCAGTCGGCGCTATGATCACCTGAAGG[C/T]CCTCAAGTGCTTCATGCCCT |
| 77 | | 3 | TCCTGTCCTTCCACA |
| MI09 | 6 | 11137409 | ATTTGGTTGGGGCTTATCGACGTGTATCAATTCAC[A/G]GCGCAAACTGATCACGTCCC |
| 78 | | 5 | TTCCGGTTTGGTTGC |
| MI09 | 6 | 11224881 | GCTAAGCATCATTCCTTAAGCATACTTAGGAACGA[C/T]TCTTTGGTCTAAAGGTAGCC |
| 79 | | 9 | CAGACATCTGGGACT |
| MI09 | 6 | 11302046 | CCGTTAGCGAACTTGGTTGCTATGCTGAGGAGATC[G/T]GCGGTGGTCTTCGTTCGCC |
| 80 | | 0 | CTCGCCAAAGCTCATG |
| MI09 | 6 | 11352741 | ATGACTTTTGGCTGGCAGGAGTCAGCAACTGAAAC[A/C]AAAAAAGTTCTCAAATTG |
| 81 | | 4 | ACGAAATTGGATTTTCT |
| MI09 | 6 | 11405045 | AAAAAAATCAATGGTGGTTTACGTTTTTTAAGAAG[A/G]AAAAGCGGAAACTTCCAC |
| 82 | | 0 | GACCACCCGCGCTCTCT |
| MI09 | 6 | 11679537 | GACAATGACTCGACACAGTGGATTCAAATCCGATC[A/G]GCGATTCTGTTACCCTAGC |
| 83 | | 5 | CCCAGTCCCGTCGTCG |
| MI09 | 6 | 11776891 | TTTTGTTCGCAAAGACGAAGAACGACGAATTCAAC[A/G]CATGCGACTATGCGAGTGT |
| 84 | | 6 | CGCCAACCGTGAGAAT |
| MI09 | 6 | 11868550 | TAGAATAGGTTAGGTTAAATCTAGTTGATAAATAA[A/C]CTTAGAGGGAAATAACCACT |
| 85 | | 7 | CCATCGCATTTGTAG |
| MI09 | 6 | 11886573 | TGGCCGTGGGTGAGCCATTTTCCCACAACAAAGAC[A/G]AAATAATATTTGTGAGGAT |
| 86 | | 5 | TTCTTTAAAAATAAAC |
| MI09 | 6 | 11917342 | TTCTCATAGTCCCTTACAGGGTCAGCATGGAAGCA[A/G]CTAGAGAATCAGTTTCACA |
| 87 | | 9 | CCCAATATCATTCTAA |
| MI09 | 6 | 11958204 | AACGTAAGTGTCTTAAACATTATTTCATCAAACCA[C/T]AGCGGATCTCATGGGTAATC |
| 88 | | 1 | TCCCACAGGAAGATG |
| MI09 | 6 | 12121375 | AGCGTCTTCATCATCGGCTTCTTTCTCTGCAACTA[A/G]CATAAGCATCTCCAGTCGCT |
| 89 | | 0 | TGTCGAACAGAGCTG |
| MI09 | 6 | 12647669 | CATTCATTGCACTTGCATCGTTGTGTTGCCAAAAA[A/T]TTTTACTGCAGTTGAAGGTG |
| 90 | | 8 | TTTGCATCCTTCTCA |
| MI09 | 6 | 12763443 | CTAGTTTTCTTTAAAAAAATATCAGGAACACGATG[C/T]AGCCGATCGAGCTTGCACG |
| 91 | | 6 | CGCGCGTACGCCCATG |
| MI09 | 6 | 13054169 | GAGTGGCTCATGGCATACTCTGCATTGGTGTCTCC[C/T]AGGGGCAGGTTGAATGCCC |
| 92 | | 9 | TCACGCACGAAGGCTG |
| MI09 | 6 | 13154444 | AATATTACATTCCACGATTCCTGCTCCAGGTTGAC[C/T]CCTTGTCCCATCTTTTCATTC |
| 93 | | 4 | TCCTCTCTTTCTTT |
| MI09 | 6 | 13597936 | TCCTATTTTCATTTTTTAAAATAATTGTCACTAAA[C/T]GCATGAGTGTGTCAAGCCGTC |
| 94 | | 0 | AAGCGACAAAAACA |
| MI09 | 6 | 13784243 | ACACGCATACTACAGAAAACTAGAGTCCAAATGCA[C/T]GGCGCAAAAGTACACACG |
| 95 | | 7 | ATGAATACGTCATTTCC |
| MI09 | 6 | 13958389 | ACAGTAAAACCTCAAATTTAGATTATAGAGTAGTC[C/T]ACTAGGGTATAGTTATTTGA |
| 96 | | 4 | GACACTTGAGAGAGG |
| MI09 | 6 | 13987441 | AAGCACGGCCCTTGGCACATGCTTGCCGTTGACCC[A/G]CTGTTGCTGTTGCTGCTGC |
| 97 | | 5 | CGCCGCCGCCACTGCC |
| MI09 | 6 | 14018317 | CCAGCCCTTGGGTATGATCCTCAACCACCTTCGTC[A/G]CGTTTGTAGGAGTGTGTAG |
| 98 | | 2 | CACCTGTCCGTTGACC |
| MI09 | 6 | 14086372 | GCTGCACCTCATCGCTAACAATCAGCCGCAACGCA[G/T]GCACCAACCACGGATTCTG |
| 99 | | 6 | CTCAAGATTCGTCCTC |
| MI10 | 6 | 14116842 | CAATGAGTAGTTGGTTCAATATACAAGTGGCATGA[C/T]ACAAATACAGAGAGATAAG |
| 00 | | 1 | ATTAAGGGAAAATATA |
| MI10 | 6 | 14227489 | ACCAATGATTCAGCTGGTGATGGGACTACAACTGC[A/G]TCCGTCCTTGCTCGTGAAA |
| 01 | | 1 | TCATCAAGCTAGGCCT |
| MI10 | 6 | 14239024 | CTATAACGGGTGAAATGTAATGGAACGACTAAAAC[G/T]GTAGTCGAATGTCTGAAAC |
| 02 | | 9 | TATAACAGAATGGCTA |
| MI10 | 6 | 14250093 | TAAGGTTTAGGTGACGAGCCTAATTAAAGCATACT[A/G]AGAGGCTACTTCTACTACGT |
| 03 | | 8 | ACCTGCCGCGCCGGC |
| MI10 | 6 | 14253418 | GTGTTGCATAACCAGATTCCTCAATGCCCACAGTT[A/C]TTTGGTCCTCTCTCTCCACT |
| 04 | | 0 | CGGTGCTGATCTGAT |
| MI10 | 6 | 14349401 | ACTTATGCACGAGAATGACTACTAACTATTATGTC[A/C]TTGATTCTTGATTTTATTTGT |
| 05 | | 6 | ATTATATTTCTAGT |
| MI10 | 6 | 14394619 | CCTTTTTATTTTTGTACACACCTGGATGGATTCGG[G/T]GTCAGAGTACCATTAATCCAT |
| 06 | | 0 | TTATGGCAATAAAA |
| MI10 | 6 | 14666020 | AGATCAATTTATGGGTGTTGTCGAGGCTAAATTTA[G/T]GGCATATGACTATGAGCATG |
| 07 | | 0 | CATTGAATGAATTGT |
| MI10 | 6 | 14675572 | CGCTTGTCTATATAAAGCTGGAAGCTCTGCTCCTC[C/T]CGCCATCCCACATCCATCTC |
| 08 | | 8 | CACCTCCCTCATACA |
| MI10 | 6 | 14785372 | CAAAACCAATGCTCAAACTCCACCACACATACTCT[A/G]AAGGGCCTAGAATCATAAC |
| 09 | | 2 | CACAAAATTTTGGACT |
| MI10 | 6 | 14799941 | ACACGACGACACGAGCGACGTGGGCGTATTTATAA[A/G]GTGCGGTGAGACGAGAAG |
| 10 | | 9 | GATCAAGGTCAGCGCGG |
| MI10 | 6 | 14945490 | TAGACGTCGTTATAGCCGTCACCGGGTTTAAATAT[C/T]GACGGCCCCAATAGGTTGTT |
| 11 | | 1 | TGGCGGTGACCGTTG |
| MI10 | 6 | 14952880 | GGACACATAGATAAATCATTCAATCATTACATACA[C/T]ATGTGTACAATATGTATTAAG |
| 12 | | 4 | CCAAAAGTAGTTTG |
| MI10 | 6 | 14986477 | CCACAGTATTTGCTATACGTGCTTGTTCCCAGCAT[A/G]CCAGTATGTCTGATATTCAGG |
| 13 | | 1 | CCCTCTCCTTTCTA |
| MI10 | 6 | 15108063 | CTTTGGCTAACATTCTGCAGCAACCTGGGGGCCCG[A/G]CAAAACGCTTCCGTCCACG |
| 14 | | 5 | CGAAACTGATCGAAAT |
| MI10 | 6 | 15212457 | ACCAAAAGATAACGAGATCACCCATATATAATACT[A/T]TCTGTCTCAATTTATAATTCG |
| 15 | | 0 | TTTGACTTTTGTAT |
| MI10 | 6 | 15245673 | ATGTTGTCTAATTCAACTTTGAATAGGCGTTTTTA[G/T]ACTGAAGTTGCTTTTATTGCT |
| 16 | | 5 | TGTTGTTTTATTAA |
| MI10 | 6 | 15312832 | CTAGTCGACCTAAATAAATTTAGCCCAAAAGACTG[C/T]GCGATTCATTGTTGAAACG |
| 17 | | 9 | GAGCTTCGCCTTGCAT |
| MI10 | 6 | 15427768 | GCATGCAAACAAGAACATAGATTTACAGTGGCTTG[C/T]ATCATCAATTGAGCTATGTT |
| 18 | | 5 | TTTTCGATAACCAGT |
| MI10 | 6 | 15428221 | CTTGGCCTGCCTCTTTTTTTAGTAAACTACCACAC[A/G]ATCATGTTATTTTGTACAATT |
| 19 | | 4 | TCATAGCTAATTGA |
| MI10 | 6 | 15436918 | TGGATGGATGGATACCTCTGCAATAGAAGAGATTT[A/C]GCACAAATTACGAAACAAA |
| 20 | | 5 | TATGAGACGGAGCAAA |
| MI10 | 6 | 15694396 | TTTGCGTGTGGCACACTGGCACACCGTAATCCACA[C/T]CGATCATCGTGGACCGTGG |
| 21 | | 5 | TGAAAGCGCGCGTAGC |
| MI10 | 6 | 15856695 | CAAATACTTAATTTTGGGGATTGATGGAGGGGATT[A/G]AGGGAAAATTAACTAGCCC |
| 22 | | 1 | TTAACAGAAAATTGAT |
| MI10 | 6 | 16052401 | GGCGTCGTGGCCTCCCAGAAAGAAAACGCGTTTGC[A/C]GGATCGGATCTTGGCCGG |
| 23 | | 6 | ACGCGGCCGCGGCGGCC |
| MI10 | 6 | 16089726 | CTCCAAAGGAAGAGTTTCACGCTCCAGCTTTCGCA[A/G]GAAAGCCCTCAGAGAACC |
| 24 | | 7 | GCCGGACAGAAACTCGG |
| MI10 | 6 | 16308062 | TATTATATGTTCTGTGTAATACTCATTACTACTAT[G/T]TTTTGGTTGGATGATCATCTA |
| 25 | | 0 | CTGTTTCTCAGACT |
| MI10 | 6 | 16311400 | ATGGGTTTTTAGTGTTAGTAGATCTTTCGTGTTTA[C/T]GCTCTTTAGTTAAAATCTTGG |
| 26 | | 3 | AATTTTATCATATT |
| MI10 | 6 | 16325456 | CTCTCCCTTGGTTATTTGGAGGAGGACGAACCTTG[C/T]CCCGTCCCTGCAAGCCCAT |
| 27 | | 2 | ATGCTTCGGTGGTCCT |
| MI10 | 6 | 16411671 | TGCTCGTGAAGGGTTATCCTTCTAGTTCTTACCAC[C/T]GGCGTAAGGCTGTGTTTGTT |
| 28 | | 7 | ACGCAAAGCAAAAGC |
| MI10 | 6 | 16451456 | AACCGTCTATCTACAACCTAGGTCGGGACACATGA[C/T]GGAAATGGTGATGGCGACG |
| 29 | | 8 | ACGACGACGGCGATCT |
| MI10 | 6 | 16505370 | ATCCCATCCCAGGAGAAGAGGCATATTCTCCGGCG[C/T]AGGGAGGGAGCAAGCAAC |
| 30 | | 1 | TCAGGGTCAAAAAAAAT |
| MI10 | 6 | 16912422 | ATCTTAATTATTTCAAACATGGAACTAAAATTACT[A/G]ACGGTTAATTTGGTTCGGTTA |
| 31 | | 5 | TTCAGCTTTGGTTT |
| MI10 | 6 | 16930994 | GAAGGATACAACACTAGTGAGGAAGCATACAACCC[A/G]ATCCGAGAATGCCTCCAC |
| 32 | | 2 | GTCGACTCAGAGATCCA |
| MI10 | 7 | 1631705 | GGCATGAGGAAAGCTGCGTCCAGGCACCACAACCT[A/G]CACCTCCACCCGCAGGCA |
| 33 | | | AAACTAGCTACAACAAC |
| MI10 | 7 | 2563092 | AAAAGTCAATCAGAATAATTATGTGAAGGCAAAAG[A/C]AGTCCCAAAGGTCATACAC |
| 34 | | | ATGTACAGGGACTATT |
| MI10 | 7 | 3003531 | GGCGTGCAGCTCTAAAGACAACAAAGTCAGTCAGC[A/G]TGCAGGGGACACCCACT |
| 35 | | | GCTGAAAACTCATTGACA |
| MI10 | 7 | 3763473 | AATTGAGCACGCTTCTATCACCGCTCCACGTATAC[C/G]ATTCGCTCCAATCAAATCAC |
| 36 | | | GTTAGATTTATATTA |
| MI10 | 7 | 4083633 | GAGATTCGTCTCGTTGTTCGAGCAGAAGCCGAGCA[A/G]CCTCACGATGTAGCGGTGT |
| 37 | | | CGGATCCTCCCGAGGG |
| MI10 | 7 | 4835244 | GCGGCCATGGCCAGGTCTGATGATCAGTGCGACCG[C/T]CTTGTGTGGGCATTGCCCA |
| 38 | | | TGGAGCGTCCGCTCAG |
| MI10 | 7 | 7155293 | CCGTCGCTGCCCTACCTTCTCAGGCCACCATCGCA[A/C]CCTCACTCGCCACCGTCGC |
| 39 | | | GGCATCTAATCCCTGA |
| MI10 | 7 | 7917139 | ATCGTCGGCGACACGCTAGGTGCGTGCGTACGTGC[A/G]CAATTGCATATGCATGCGT |
| 40 | | | AGTATATATATAGCCC |
| MI10 | 7 | 8182989 | GTAATAGTGCTCCGCAGAACGCTGCAGCACTAAAC[A/G]GTTACCAAAATTTACCGAG |
| 41 | | | AAGCTCCAGCGCAAAT |
| MI10 | 7 | 9630005 | CATCATCTGAGTGCCTGCCAACAGCAGGGAGATAC[C/G]CTTGGCTCCAACCGCCACC |
| 42 | | | CATAAATCACACTCCT |
| MI10 | 7 | 9833298 | TTTCATGTAGCATAACCTTGCTAACTTCTTGTGAC[A/G]GGAGGGGTTGTGTGCGGTTC |
| 43 | | | GTGGGGGCACAGGGA |
| MI10 | 7 | 9919655 | TATGCCAGATACTGAAGTCAAGCAAATGCTCATGG[C/T]GAGAGGTACCCCTGATTCA |
| 44 | | | CCATCACTCACTTATT |
| MI10 | 7 | 10789564 | GAATCAATTATCCACCTCTTCTTCAAATGCAACTA[C/T]GCGAAGAGATGTTGGCAGAC |
| 45 | | | AATAGGAATCACTCC |
| MI10 | 7 | 10800312 | ATTCCGGTTGATTTGCAGCTTATTAATTGTACGGT[G/T]TTTTTTTACTCCTGGGCTTAT |
| 46 | | | CGATCTGTCACTTG |
| MI10 | 7 | 13862480 | GGCTGGTGTGGTGTGTGTGTGGACCAAATTTATTC[A/G]TAAGCATAAAATTCAGTTTT |
| 47 | | | CCAAACAACATTCCC |
| MI10 | 7 | 14080772 | GGTGGACTATTTTTTTGTCTCATGTTGCTCAGTCA[G/T]CTATGGTTGTGGTCGCTCCTC |
| 48 | | | AGTAACATTAGCGA |
| MI10 | 7 | 14876814 | ACAACTTCAAAAAGTATACCAAACGGTGGACTCTT[C/T]CATTGGCTTCTTGTAGCATC |
| 49 | | | CAAAATCCTGATTTT |
| MI10 | 7 | 15053002 | ACAACGCTATCCAAAGGATGCGAAGATCTGCATCA[C/T]TGTAGTCTTTAAGGCTCGAT |
| 50 | | | ATGCCGACTTCTTTA |
| MI10 | 7 | 17254591 | ATGAAGGAACTCTATTACTTTCTTAGATTCTGACA[C/T]TTAAAATGAACATGTTTATGA |
| 51 | | | TAACCGTGAATCAT |
| MI10 | 7 | 18152027 | TGTAGCAACCAACCTTTGCAAGAAAAGTAGCAGTT[C/T]AATTTTTTCCATTACAAGA |
| 52 | | | GGAAACAAAGTTGATG |
| MI10 | 7 | 18373857 | CTGAGCAAGTGTCGAGGTGACAATCACTCAACAGC[G/T]CGATCTGGACGGCCAGAA |
| 53 | | | GCTCCGGTCGCTTTCCT |
| MI10 | 7 | 20200790 | TCGGTACGTGTTCTGACGTGAGCACTAAGCCGGGA[A/C]CTCACCAGCATGTATAGTG |
| 54 | | | AGTACCTGTGTAGAAA |
| MI10 | 7 | 21288129 | ATGTTAAGGCCCTCAGATTCTTCACCGTAGTCCTG[A/G]TAATTGAAACGAAACAGTG |
| 55 | | | GAATGTCATGTCACCT |
| MI10 | 7 | 21649443 | CGAAACGAATTACATTTTTCATTTTTCAGGGGAAA[A/C]GTTGGTCTGGTGTGCGCTCT |
| 56 | | | GCTGGAAGCTGATCT |
| MI10 | 7 | 23549455 | ACATTTCCTTCCTTCACTTCAGACATGGTCAGCTC[A/G]CAGCTACAGCTGCACCGTTA |
| 57 | | | CGCAACGGGTCGCGA |
| MI10 | 7 | 25596939 | AATGGAACCTATCAGCTTCTTGCATCGTTCAATTT[G/T]CTATGATCAAAGCCAAAGCT |
| 58 | | | TACGTAGTTACGTTT |
| MI10 | 7 | 25905364 | AGCACCTCAAGCAGTATCAGTAGCATCAGCCACAA[C/T]AATACCAATATCTGCTATCT |
| 59 | | | TCAAATCAAGTGCAT |
| MI10 | 7 | 28566928 | TTTTGAATGCATAGAGGTGTTTGGTAACAAAATAT[G/T]CTCTTTATTTTACACCATGTT |
| 60 | | | CCATTTAAAATATT |
| MI10 | 7 | 30254596 | CTTGATCGTGTTCCCTACATCGTTCTCGCCATTTT[C/T]CCGAAGGGACCTGCTGCATG |
| 61 | | | CTCAGTTATGCCATA |
| MI10 | 7 | 31902459 | GTTGACATCTTCAGGAGTATAGTGGGATAGCTGCA[A/G]AAACCTGTCTCTATACTCAC |
| 62 | | | TTACTGACATGGGCC |
| MI10 | 7 | 32639248 | TGTTCATCATGTCCCTCTGCCCAACTAATCTGCAA[A/C]GTGGCATGGTCCCCCTCCAC |
| 63 | | | TCTTGGCTGCGGACC |
| MI10 | 7 | 33703826 | TTGAATGAATTTAGAAAGAGCACTAGATTTACAAC[A/G]TCAAAATAGTATTACTAGAC |
| 64 | | | ACATAAAAAATATTT |
| MI10 | 7 | 34646711 | ACTAGTACTACTACAAGGTAACCCATGGAGAAAGA[A/G]GAGCAGCAGGCCAATGAT |
| 65 | | | TATACCGACGAGGACAC |
| MI10 | 7 | 36525772 | TTGCTGCCTTATTGCTAAGGTGAGAAAAATCATTA[C/T]AGGTACTGTGTCCATGCCGC |
| 66 | | | CAAAGTGGTCGGTTG |
| MI10 | 7 | 36570698 | GGTCGACATAGCCAACATGATGGCACTCAGGCCCA[C/T]GTTGCCCGCGCCGTCTGTA |
| 67 | | | ATAAAGAATATGGGAC |
| MI10 | 7 | 40633183 | CGATCAAGAACAGGCAGGGATTAGTTGTAGGGTTC[C/G]AGTTCCAGAAGTAGCGAC |
| 68 | | | TTTGTTGTCTTAAGTAT |
| MI10 | 7 | 43097028 | TTCTGAAATCTGCGATCTGAAGTCATTGACCTTCG[A/G]CACCAAGCCATCGAGAAAG |
| 69 | | | ACAAAATTCTTCTTTC |
| MI10 | 7 | 47437259 | AGATTCTCCTAGTGTGTAGCCCCTTGTTAGGTTTC[A/G]CCAGTCATACAAACACAGTA |
| 70 | | | CTCCTCCCTAAGGTG |
| MI10 | 7 | 47954120 | GCGGGACAAGACAAGCTACGTACACGGTACGGCAG[C/T]GCACTGCATGTGGTGATG |
| 71 | | | TGGAGCCAGGCATACTG |
| MI10 | 7 | 51374727 | GGCACTTTATTAGATTGTGCAATATACAGTACTAG[A/G]AAAATGGTCTTTATATATTCC |
| 72 | | | TTTTTTCAGAATAG |
| MI10 | 7 | 51524634 | GTATGATGTAAATGCTAGGGCCATAGTTGAGTATC[A/G]ACCTAATAGGACTCATCTATG |
| 73 | | | TGGTGCCATCAACG |
| MI10 | 7 | 54428641 | AGCACCTTTAGGGATGAAGTTTAGGGCCGTGACTC[A/G]CCGGATTGCTTTTCCCGGC |
| 74 | | | CATGGCCTCCGTCGCG |
| MI10 | 7 | 57304397 | CGAAAAACGAAGAAATTGTTACGAAGGAAAAAACT[C/T]ATGCTTTGTATGCACCCCA |
| 75 | | | ATACCCATTATCGAAA |
| MI10 | 7 | 61704876 | GGGTTAAAACCTTCAAATTGAGTGAGGACATTTAT[C/T]CGGATAGGCTTACGCACCG |
| 76 | | | CGTTCGTATGTTCATC |
| MI10 | 7 | 65421941 | GCACGGCGGTGGGTTCACCGGAGCTCACGAAATCC[A/G]GTTCTCCCGAGCGCCATAT |
| 77 | | | CCAAATTCGCACAACC |
| MI10 | 7 | 70266107 | TGACGAGGTGGGCCCCCCTCCTGTTGCTGACGCGG[A/G]TTTGGCAAACGGACTGGC |
| 78 | | | GTTCGTCTGTTCATCCG |
| MI10 | 7 | 79667562 | ATAATAAAGTCCTCACCTTTAGGGTCGAATCCAAC[A/G]GTTGCTGGCGCAGCAGTGT |
| 79 | | | ATCTAGCCAGCTCGAA |
| MI10 | 7 | 81999752 | TTCGAGTTTTGTAAATGTCTGACTCATGATTTATC[A/G]TAGAGAGAGGCAGCGAGCC |
| 80 | | | ATGAGACCCGGTCAAA |
| MI10 | 7 | 82417512 | TTTCTCGGTACATTTCTAAAGTGTTAAAGGTGCTT[C/T]GGCAAAGACCACCTTCGGG |
| 81 | | | GTGAATCAGGAAAAGA |
| MI10 | 7 | 83062843 | GAGGATTGAACGCCTCTGAACGCAGCACATTGAGG[C/T]TGTGCGAGACAAATCAGC |
| 82 | | | CACGGAAAACAAGAGCC |
| MI10 | 7 | 83480640 | AATATGAGCAACGCTACATGGTGTTTGAATACTGC[G/T]AAATGCAAGCGGTGCTGGA |
| 83 | | | TATCAATTAATCTCCA |
| MI10 | 7 | 92993698 | TTTGTGCAGCCCATCAGTTGTCGCAAAAAAAGTTC[C/T]AGCGCCGGCTATGCTGTTG |
| 84 | | | GTTCCATGCCAAAAAA |
| MI10 | 7 | 94971993 | TCAGTTTGTTGATCTTTTCTCTCACATCCAGGATA[C/T]TGTTCATGATCCAATCACAAG |
| 85 | | | CAGAATGAATAACA |
| MI10 | 7 | 95247076 | TGGCTACGATAATCCATATTTTGAAAGCGAACTAT[G/T]ACATAATCATTTGGAATTGCA |
| 86 | | | TTGAGAAGTCCTTG |
| MI10 | 7 | 98888851 | GCATATGCATTCCTTGCACCAACCAATGGAGCCTA[A/G]AGGAATTGAAGGCGACTGG |
| 87 | | | AGCTATGGCCCTTGAA |
| MI10 | 7 | 99487571 | CCTGGTAACCAAAATGGCCGACACCCCTATTTTTT[A/G]TCAACATGACCAAAATCAA |
| 88 | | | CACCCAACCTTCTCTC |
| MI10 | 7 | 10032125 | ATGAACCAAACAGCGTAAAGGGATTGGACCACGTT[A/G]CCAAAGGCAACAAACAA |
| 89 | | 7 | AAATAGGTAACCATTGCA |
| MI10 | 7 | 10082681 | ATTTGATCAGACCGACGAGGCTACTATACAAATTA[C/T]GTAATCAGTAAAACAAAAAT |
| 90 | | 3 | ATAAACTGCCCGTCT |
| MI10 | 7 | 10160641 | GGCTAGATTCGACTCAAAGAAAAAAATGAAACATG[C/T]GATCTAATAATCAACAAAG |
| 91 | | 3 | TTACTATTAGCCCAAC |
| MI10 | 7 | 10184643 | ATCTTACAAGTATGGGCTAATGTGGTTAGTTGCTG[A/G]CTTGCTTTAAGATTAGTGGG |
| 92 | | 9 | ATGAACATGTTGTCA |
| MI10 | 7 | 10244787 | GTCAATGAGCTTAATAATCCTGCTAGAATTCAGAA[A/G]TATCCTCCTTTAGTCTGTGG |
| 93 | | 0 | GGGTGTTTTCTTTCA |
| MI10 | 7 | 10357046 | AACTCGAAGGACAGATGGCGTTATATTTGGGGCTC[C/T]GATATTTGTTCAACAAAAA |
| 94 | | 3 | AGACTTACAGACACCT |
| MI10 | 7 | 10368468 | TTTGAATGCAGCATAGAATTATTGACAACACTTAT[G/T]GCACTCGTGACATCGCAAGC |
| 95 | | 1 | CAGGGCCCATGATTA |
| MI10 | 7 | 10387893 | ATTCCCCTTGATTGCATCTATACGAGGGTGGTTTA[A/G]CCTAGCCCCAAACTAGATCG |
| 96 | | 0 | AGGTTCTTCCATCTG |
| MI10 | 7 | 10666435 | TCACGAGCATTCCTGCTCGGCTGCTCCTCCGTCAT[G/T]CGCCGCCTTCGTCCTCGCCC |
| 97 | | 2 | TCGCTCCTCTATCTT |
| MI10 | 7 | 10702074 | ATCGGCCCTTTGATGTGTGGTTTGAGTATTATGCT[A/G]TCTCCCCACCCACTGGTTTG |
| 98 | | 2 | GGTTTTGTGGGGATA |
| MI10 | 7 | 11008247 | AAGGTAATCGACACATACCTTGTCCTTTTTTGTTG[A/T]TCCTTAATCCAACTTTATCCA |
| 99 | | 9 | ATGTTGTAACCTGC |
| MI11 | 7 | 11080846 | TATAGAGGATGTATATAGAGGAAATAGATTTAATG[A/C]CTTGGTCGTTTGTTCCCTTCC |
| 00 | | 4 | TAACTCCTCCCCAT |
| MI11 | 7 | 11115537 | TCGGATGATTAGTCACTTGATGAAGGGAATGGTTC[C/T]GATACCAATTGAGAGCACCT |
| 01 | | 1 | AGAGGGGGTGAATAG |
| MI11 | 7 | 11143588 | AATGTGATAAAGGGTGAACCGTTGATCACGAAGGG[C/T]CCAAGGCTGACATGCATGT |
| 02 | | 1 | TTGCTGACGGATGTCA |
| MI11 | 7 | 11256925 | TCTCGTCCGCTTGTAACCCCTACTACGAGCAATCA[A/G]CAACAGGGAGTCGGTAGCA |
| 03 | | 3 | CGAGCCACTAAAGACT |
| MI11 | 7 | 11296412 | GTTTTGGGGAATGAAAATAGTGAAGACAGTATTGC[A/G]AAATCGAATTGGAGATGAA |
| 04 | | 1 | TTTGTGAATGAGTGTA |
| MI11 | 7 | 12008661 | GTTGAACTCTAACACCACGAGCACGATCGACCTCA[A/G]CAACTGTTTTCAAGGCTCA |
| 05 | | 3 | CCCGAGTCCCGAGGTG |
| MI11 | 7 | 12143169 | AGCGTCCATCTTCTCCAGCATACAGTTAGTTATTA[A/G]ACCAACAGCGCAATCCAGCT |
| 06 | | 0 | TCTTTTTTTTTAGCC |
| MI11 | 7 | 12143810 | GGATGCTGTGGCTCCTTAACCTGCAGCACAGCTTT[A/G]CCGGACGCAAGTTCGAGC |
| 07 | | 5 | ATGCACTGAAGCATGGT |
| MI11 | 7 | 12180549 | AACCTATTCCGTTTCTCGCTCTGTATCGATTCTAG[C/T]TTCTCCTGTCGGTGATGGTTC |
| 08 | | 4 | TTATGGCTAGCAGG |
| MI11 | 7 | 12589885 | TAGCTTATTCTAGCGCAGTCAAAGATTCACACTGA[C/T]TTGGGTTCGTTCTCACTGAA |
| 09 | | 2 | CCTTAATCTATTAAT |
| MI11 | 7 | 12649958 | GTTTTAGTCACTGCAGCTGCTGGTGGAACAGGACA[A/G]TTTGCTGTTCAGGTGAGCT |
| 10 | | 6 | GATGACACTTATGAAC |
| MI11 | 7 | 12712959 | TGGAGAGAGAGATGCAGTTGGTTCCACTTCCACCC[C/T]GCTTCTGAAATAGTCTGAT |
| 11 | | 2 | GGAGACGTTATAGTAA |
| MI11 | 7 | 12845372 | ATGCGATGCAGGGGGGTTTTATATAGGAGTGCTGT[A/G]TGTGTGCTGGTTGTGGAGG |
| 12 | | 1 | TTCAAAGCCGGTTAGG |
| MI11 | 7 | 12946783 | TGTAGAATATTATAAAATGGAGAATTGTGGGACCC[A/G]CGAGTGGTGGATCTAGAAA |
| 13 | | 0 | TTGGTCAAGACCTGGG |
| MI11 | 7 | 13027840 | AAAAAAACTCTCTGCGCACGGACCGATCACTCGTC[A/G]TTCCGACGCTGACGACGG |
| 14 | | 9 | CGCATGTACTACCGGTA |
| MI11 | 7 | 13114279 | TCATCAATCAGTCTGTGTTCTTTGCAATGGTCCCT[A/G]GATTACCTTTATGCCTGCAGT |
| 15 | | 3 | GCCCTTATGCATAA |
| MI11 | 7 | 13114346 | ACTATTCTATGGCCTTGAAGGTGCACCCTGCAAGG[A/G]GCTAATATATTGCTTACCAC |
| 16 | | 7 | CGGCATTATCTGACG |
| MI11 | 7 | 13220090 | GGCATCATTTAATGTTTAAGATCTGCTTTTCATGA[A/G]AGCAGGGTCAGTAATAGAGT |
| 17 | | 6 | CAAGTGTTAGTATAC |
| MI11 | 7 | 13226175 | ACAAGCCTGTTTGGGAGCGCTTTTCATCTGATTCT[A/G]GCAAAAAAAAGCGACAGAT |
| 18 | | 0 | GCTCACCAAACGCTTC |
| MI11 | 7 | 13242237 | TTTAATTCCTCTCGGCTAGATATTATAATACGGCG[C/T]CTCAAACGCCAGATCAACCA |
| 19 | | 4 | ACAAAAAAAAACTCG |
| MI11 | 7 | 13341259 | TCTGCCTTCTAAACACTCCTCGTTTCCTCTCCAAT[C/T]TCCCCTACTGGCACCAAAAC |
| 20 | | 6 | CCGCTACGGGTTTCA |
| MI11 | 7 | 13398197 | TGGACAGTTTTCTCGAATTTTTTACTTTCTCAGGG[A/G]AAAAAAAAGCAGTACCAGG |
| 21 | | 1 | AGCACATCATCATCCT |
| MI11 | 7 | 13737299 | TCTATTTATTTGCAAAACAGCATGTCTCGTCACAT[G/T]TTTTTTATTTATATGTCATCT |
| 22 | | 5 | TCTTTCATGTACTT |
| MI11 | 7 | 13963899 | TCTCAAAGGTACTCTTGCTACATGCCGAGGGTAAC[A/G]GGATAATAGGAGTAACCCT |
| 23 | | 7 | CTTTAATTTCTGTGCT |
| MI11 | 7 | 14366827 | GTAGCAACAGGATTAAGTCAAGTGGAGCAGAATTG[A/G]AAGTTCGGGGCTGACAAT |
| 24 | | 0 | AAAAAATAATGGTACTA |
| MI11 | 7 | 14426484 | TTCGCTACCTGCAATCGTCTGATGAGAATATATAT[A/G]ACGAACTTTTAGTCTCTTCTG |
| 25 | | 1 | TGTATGCATAAGTT |
| MI11 | 7 | 14500928 | CAATGTTGTGCTACTCAACTAAAACAACCACAACG[A/G]TGCTATACCTTTAGCGATA |
| 26 | | 4 | GTTACATTGACTCCGG |
| MI11 | 7 | 14525846 | GAATGGTCGAAGACTATCACACTTGCTCAAGGTTG[A/G]TTTACTCTTTTTAAGCTCTC |
| 27 | | 0 | TCTAGCTTCTACAAG |
| MI11 | 7 | 14541662 | ACCATCTTCACCAACCAGCAATGTGTGAGACAATA[A/G]TCATGTCGCACGATTCTAA |
| 28 | | 0 | AATTACAAGGGTCATG |
| MI11 | 7 | 14581650 | GCAGACAGTCTAACAAGAGAAGGGGAAAAATCCAC[C/T]GATATCTTCTAAATAGCCA |
| 29 | | 2 | GGCCAGTTGGGTGGAC |
| MI11 | 7 | 15154752 | ATTCACGGGCAGTTATTAGCAAGAACGGTGTAGCG[A/G]AGCAGCTTTCAGTTGACCA |
| 30 | | 1 | TGAACCAAACATGGAG |
| MI11 | 7 | 15369232 | GGATGACCGGGACAGAGTGGAGTCGTGGGGAACAG[A/G]TATAGGGGATGGTCGATC |
| 31 | | 2 | TCCGATGTATGGGGTGT |
| MI11 | 7 | 15431261 | GAATAGACAAGAGTTCAGATGATGGTCGTCAATGC[C/T]CTGGAATACAATGAGGTCA |
| 32 | | 5 | CATGAAAACTTACGCA |
| MI11 | 7 | 15511109 | AGTACGCGATTCATCTCATCATCACGGCACCCGGT[A/G]GTGTCCATTATTGATTGATTA |
| 33 | | 4 | TTGTTCACCGAGGC |
| MI11 | 7 | 15582171 | TGACTGCACGAACGTATGAGATGAACTCACCAGAA[A/G]CGTAGCTCCACCAGCGGC |
| 34 | | 4 | GGAGGTGGCTGAAAGAA |
| MI11 | 7 | 15705400 | GGATACCAATACGTACATGTATGGAGGAGGATACA[G/T]ATAAATGAAAGGTTGTGGA |
| 35 | | 6 | GGACAAACATTAGTGG |
| MI11 | 7 | 16137891 | TTAGCTGGGCTAAGTTTGAGTGTTTGACTAGTTAG[C/T]TTGAGGCAAGTCCAAGAAC |
| 36 | | 8 | AGCTCGAGTGGGCCGA |
| MI11 | 7 | 16324576 | GAAAAATCTCTTCCCTCACTTCACGCCATCACCAA[A/G]CAGACGCTTGCTTGCTTCT |
| 37 | | 1 | TCAGAGCATATCTTCA |
| MI11 | 7 | 16423951 | TGTCCCATGACAAGTTCTGACCTGATTCAGCGTTG[C/T]TGCTTGCTGCTGATCATTAG |
| 38 | | 2 | TCGATCTGTTGCGAA |
| MI11 | 7 | 16482737 | ACTTGGCGGCGCCTCTTTCATTGGGGAGCTTTGGG[C/T]TTTTGGAGCCGCCGCGGTG |
| 39 | | 9 | GTGGTGAGGTTTCAGT |
| MI11 | 7 | 16487194 | ACAGGGGAAATGGAAAACTGCTACTGGTAGCAAAC[A/T]GAACGAGAAAGTCTGCA |
| 40 | | 1 | GCTAATAAGACGAGTCCA |
| MI11 | 7 | 16583383 | TGGTGTTGCCAGAAAGGTGTGTGCGTCCATCCCCA[C/T]GCATCGTGTTCGTCGACCA |
| 41 | | 0 | TGACTGCATGCCGTTT |
| MI11 | 7 | 16650079 | GTTGCAGTTTAAATGCAGATAGAACTCACGTAAAA[C/T]TTTGGAAATTGGAAAAATT |
| 42 | | 8 | TCTAGTATGCCAACAG |
| MI11 | 7 | 16727070 | TTATTAAGCGAGCTTAACCACGATTTTGCGGGGCC[A/G]TGGAGGCCGGCGCGGGATC |
| 43 | | 7 | CCGTGGGTGCCAACGT |
| MI11 | 7 | 16753919 | GCAATAACAAAAACTGCGCAACTGTGTAAGGACAT[C/T]GTCTGATACTATTTGCTTTC |
| 44 | | 7 | AAAGAGTATTAAACG |
| MI11 | 7 | 16787730 | GAGAAAAGAAGACTTGTCCTTTTCCTGACTTCTTA[G/T]AACTGGGCATTTTGGTGGC |
| 45 | | 7 | TGTGTAGCTTATCTTC |
| MI11 | 7 | 16920525 | ACAAATGCGGAGAGGCTGCTTGAACCCATGACATG[A/G]ACAACTCTCACCGGGCCC |
| 46 | | 1 | ACGCTTCAGTTTTTATG |
| MI11 | 7 | 16949375 | CGCAGTTTTTATCTGCTAGCACAAGCATTCACCTA[C/T]GCGTTGTAATTGCTCTTCTG |
| 47 | | 7 | GCTTCCCCGCCTTTT |
| MI11 | 7 | 16978995 | CTGATCTGGCACTAGCAGGTCCTAAAAGGCGAACA[A/C]AACGAACTGATAGATGGC |
| 48 | | 0 | ATACATGTACCTCCACG |
| MI11 | 7 | 17028367 | AGATGAAAATGGATAAGCTATTATTTTTAATTTTT[C/T]CTGATCCGCTCTAATTCATGT |
| 49 | | 6 | GTAATAAGAATAAC |
| MI11 | 7 | 17066494 | AACAGGATAGAGCTACTCGAGAAATGATAGGTGCA[A/G]CAACAATAACTGAGAGGG |
| 50 | | 1 | CAGACCAGAGAGGCAAC |
| MI11 | 7 | 17171761 | GTCAATGGCTTTAAGAGAAGGCATCACCGAATCCG[C/T]GGATTCTATAACCCATTGAA |
| 51 | | 9 | AGTTAAAGTTATTCT |
| MI11 | 7 | 17190185 | GAAGCTTCAAACCGCCTTGGCCTCCCTGGATCTGG[C/T]ATTGCCTGACACAGTCATG |
| 52 | | 3 | CCACGCTCCTCGTCGG |
| MI11 | 7 | 17197485 | CATAATCAAGTAGCTAGGAAAAATGGATACCAGAA[A/G]ACTTTTTTAACAGAATACC |
| 53 | | 9 | AGTAGATAATGAGCAG |
| MI11 | 7 | 17208487 | TGTATCCGTGTCTACGCAAGCAAAGCAGAGGGACG[C/T]GAGTCAGCAGGGTCGCTG |
| 54 | | 2 | AGATTTGGCGCCCGAGA |
| MI11 | 7 | 17224018 | TTTTGTCCATCCTTTATTCCAATTGCACTCATGGT[A/G]GGAGAATGCTAAGAGGTATTT |
| 55 | | 0 | TGGTCCTATTATGT |
| MI11 | 7 | 17309570 | ACATATGGAATTTTGGCACATTTCTCTAAGTTTTT[G/T]ATATATTTGGTGTGGATAGGA |
| 56 | | 6 | AATGATGGACCACT |
| MI11 | 7 | 17319159 | CATGTGGTTGCTACTTGCTAGAGTCCAAGGGCACA[A/G]GTCCATGCGTTTCAGACCC |
| 57 | | 4 | TGGAAGAGACACAAGG |
| MI11 | 7 | 17414550 | CTCTTCTACCGGTCAGTAGTCCTCCCATATTCTTG[A/C]GCACACAAGCACTCCTCCCA |
| 58 | | 8 | GCTCAAAAGAATACC |
| MI11 | 8 | 561450 | AGCTTGGTGCAGGAGAAACCATCAAGAACAAGCTT[A/G]CCTACGGCATCTCTCAAG |
| 59 | | | ACCTCATACTCCTCCGT |
| MI11 | 8 | 909568 | TCTAGGGTCTTTAGGGAGATCCTGAGTATCTCATC[A/C]ATCTAACAAATCTTAGCAAT |
| 60 | | | GGGATCAAAATCTAT |
| MI11 | 8 | 2262815 | TCACAAGACGGTGATCTCATCTCATGGATCCGTCA[C/T]CACGCGTATTTGTGATTAGG |
| 61 | | | ATTAATACAGCCGTC |
| MI11 | 8 | 3573434 | TCTGCGACTGCCTCTGACCGCTGACCGCACTGCTC[C/T]CTTCTCCTGTTCTCTCTCCC |
| 62 | | | CACTTCGAGACTTCC |
| MI11 | 8 | 5137158 | CTGTCCATGAGACGACCGACAGTTGACACCTGAAT[A/G]GAGTTATGCAATATTCCTC |
| 63 | | | AGCGTCTTACTAAGAA |
| MI11 | 8 | 5598245 | ACTATTTAGAGCATTTTGCAAACCGCGACAACAAG[A/G]GACTAAAAAAAAGCAAAT |
| 64 | | | TTGCCGTCTGCAAAACC |
| MI11 | 8 | 7307424 | TTTTGCGTACTCACCGGACAGGTTCGGTGCCATCT[C/T]AGAGATAATTGTTGGATAAT |
| 65 | | | TAAAGATGATATACC |
| MI11 | 8 | 7744350 | TCGTTCAACACTCTCACTTGTGGAAGTTGGTCAAG[A/G]GCCGAAGCAGCAACCACT |
| 66 | | | ATGATTAACAAGGACAT |
| MI11 | 8 | 7791757 | GTCCTGCTGGACTATGGAGTATCCTTGGACTTTCG[C/T]TGTGAATCGATTTTTCTTTGG |
| 67 | | | TGGGCGCTTCGGAC |
| MI11 | 8 | 7793262 | GGCGGTTTTACACGGGCCCAACGTCTTAACAACGC[A/G]CTGGTGGCGACGTGAAGC |
| 68 | | | CTTCGTACTCCACGCGC |
| MI11 | 8 | 9899035 | GACCACCTTCGCTGGAGCCGGCAACGGTCTCCTTC[G/T]GCATCTTCCAGTCGCTCAC |
| 69 | | | AAGTGGCCACACCTTG |
| MI11 | 8 | 10763566 | AGGCCACTATGCCTCCTGCCCCACCCTCGTCGGCG[A/C]TGCCCGGCATACCGCCCTC |
| 70 | | | CCTATTAAGAGTGTAA |
| MI11 | 8 | 15104895 | TTTCAAATGATGGCTTGTTTTGGTGATTTTAGATG[C/T]CAATTTAAAATATTTTAAGGG |
| 71 | | | ACAGTGCTATTTTA |
| MI11 | 8 | 16347015 | TATCCACACCTTCACCAGATGGTGCTCGAAACATC[A/G]CCGTAGATTTCGTGAGAGT |
| 72 | | | TGCTATACATAGCTAG |
| MI11 | 8 | 16425161 | AAACGGCGAAAGGTTTATAGATCTTAATACGACGA[C/T]ATTAGCTGCATTATTTGAAA |
| 73 | | | CTCATGCTAAGCGGA |
| MI11 | 8 | 18322354 | ACAGCCAAACTGCGTAGATAACCAGCTAATTAGAT[C/T]AGGGAAAGTAAAAGAGAC |
| 74 | | | AGAGCGAAGGAGCTCAC |
| MI11 | 8 | 24128220 | TTCCATTGAAGTGAAACAGGAATAATTAAGCTCTC[A/G]GAAAGAACAGGCCGACGA |
| 75 | | | CCTTCGGTTCAGCAACA |
| MI11 | 8 | 24353321 | AATTTGAGACAGAAATCAAGAAGCGTGGGCATGAC[A/C]GGCTCGTCGTCCATCCAG |
| 76 | | | CGCTGCTCAGGACAAGC |
| MI11 | 8 | 26168961 | GATTAGTTTGGAACTAAACCAAAGTTGATTAACTC[C/T]TTGACAATCACTCATCATCG |
| 77 | | | TAGACACATCATAAC |
| MI11 | 8 | 29996472 | TTGTTCCACCATTATATTCTGTCAGTTTGGCTTGT[A/G]TGTACGATCGACATGCATGCT |
| 78 | | | AAATCCTTCCTTCT |
| MI11 | 8 | 35003543 | ATACATCAAGGGGAGAAGAAGAACAAAATAAGAAG[G/T]ATGGCTAAGGGATACAAG |
| 79 | | | CAACAAGGCCACCACAT |
| MI11 | 8 | 40262882 | TTTCGTCTACATCCTGTTGTTCGTCGTCTTCTCGG[A/C]GACGCGTGTTGTTGCTCTTC |
| 80 | | | TTCCCGAAGACCGTT |
| MI11 | 8 | 44527180 | GGACGCGGGAGCTCGGTGGGAGAAGAACAATAGTG[C/T]CGCAGGCCCAGTGGTCG |
| 81 | | | GCGCCAAAATAAATGAAT |
| MI11 | 8 | 44829086 | TGGTTAGCACATAAATGAGTTAAGGACTCACATCC[A/G]GCATCTGCAAGATGAGCTT |
| 82 | | | GCCGAACGAGATTTGA |
| MI11 | 8 | 45386174 | AAGGGGGGCGCATGATCTAACCTGATTCGTTCATC[A/G]AGATATCGACGACTTCCACT |
| 83 | | | TCTCCCCCACCCTTC |
| MI11 | 8 | 46360391 | GTTTATTTTAAATAACAAAGATCCCCATCGGATCC[A/G]CCCGATTCAACACTAGGGGC |
| 84 | | | CTAGATTCGATCCTC |
| MI11 | 8 | 53355107 | AACAAATTATCGGCGTGCAGAGGATCTGGAGAGCT[A/G]GCGAAGGTATGTGGCTTGT |
| 85 | | | GGTTCATGAACTCCCG |
| MI11 | 8 | 53405933 | CCGTGCGATAGAGATCGAACGGTGCACATCAACAC[C/T]GGGAGGGCTGATGGCTGC |
| 86 | | | GGGCGGCGCCGCTCCTT |
| MI11 | 8 | 53612617 | TCGACATAGGGCCTGCTCGCGGCGAGCTCGGCCGG[C/T]GAGGGATTAGGATGAGGT |
| 87 | | | GCGGGCCAGTTACTTGA |
| MI11 | 8 | 53937902 | TTAGTACAATAGGTTATTAGAGATGGCAACGACTG[C/T]TATGCAAGCAGTGCTTCTGT |
| 88 | | | GCAAGCGTGCAAGCA |
| MI11 | 8 | 59652747 | ATTAACATGTAGACAACGTCGTTATAAATCTAACG[C/T]AATTTGAACGGTGCGAAACG |
| 89 | | | GACTTAAAATACAAA |
| MI11 | 8 | 65612115 | TGTGTGAATAGTTTGATAACAGAGAAGAAGCGCAA[C/T]ATTAATGAACTGCAACTGA |
| 90 | | | TAATATATAATATCAG |
| MI11 | 8 | 65809709 | TGTAATTAAACAGTAAAGCAAGATCACTGTGCGTG[A/T]ATTGGGCTTACCAAACTTC |
| 91 | | | TTCTGGGCCAGTAATG |
| MI11 | 8 | 66870876 | GTCTTCATTGCTGTGCAGCTATTTCATGTCAACAA[A/G]GTCCCTGAAGCACTTCCCGC |
| 92 | | | CATGTCGATCACCAT |
| MI11 | 8 | 67491530 | TCGCTCTCTCTGCTTCTGCTTGGAGTTGAAAGCAA[C/T]TGTATTGTATTCAACAAAAC |
| 93 | | | GAGCCGCAATGCGTC |
| MI11 | 8 | 68201240 | TTAGTGCCCAACATTGCCACACCATATGTTAGTCA[G/T]ATTATGCTTTCTTAGACAAC |
| 94 | | | GAGTTAGGTTAATAC |
| MI11 | 8 | 71527331 | GACCCTTACCTCCGCGCATCATTATTGGCGCCGAG[G/T]TTACACGTTTCGGCACCAAA |
| 95 | | | ATAAATGGCGCCAAG |
| MI11 | 8 | 71817174 | GAGTGGGGTGATGGCTGGTTTGGTGAGAACGATGA[A/C]TCACCGCCAGACTTTGGA |
| 96 | | | GACGACGAAGTCAAGGT |
| MI11 | 8 | 72292085 | CCATTCACTACTGACTGAATAATAAGCTCTTAGCC[A/G]GATGTTAGAAGACACATATT |
| 97 | | | TTACTTAATTAAACC |
| MI11 | 8 | 75162960 | CACACAGCCACTTCCACCGTCCGTCTGTCTGTCAG[C/T]GGTGTGCGCCTATTGCAGG |
| 98 | | | AAATTTCATCGGCGTA |
| MI11 | 8 | 75409846 | ATTTTGAACCTGAGTAAGCAATTCAAATTACGCAA[G/T]AGGTCAACTCCACGTAATTT |
| 99 | | | AGACCCCACCACCAC |
| MI12 | 8 | 75559898 | CGATGAATACAATAGGATCTGGTGAGGTGGATACA[C/T]CAAATATATTACAATCGCAC |
| 00 | | | GTAAGTTCAATGCTT |
| MI12 | 8 | 76379246 | TCGCCAGGAAAAATAAAGCGGATCACCTAGACGAC[C/T]TCGCAGAGACATTTGCAA |
| 01 | | | ACATGAGGGACGCTCGA |
| MI12 | 8 | 77073467 | GTCTACTATGCCGCACTTAAAACCCAGGCTCAACA[C/T]GGTGGTTGGGTTGAGCCTA |
| 02 | | | ACTCGTCATGCTGCAC |
| MI12 | 8 | 80021659 | TCTATGCCATCCGGACACAATTTCTTATTCTTCCT[A/G]CCATTGCCTGTGGCATAAAAG |
| 03 | | | GGATTGGGACCTGC |
| MI12 | 8 | 80767553 | CCAACGTTAGCTGGGATTTCCCCGGTGAGATTGTT[C/G]ATGCCCATGCCGAGGTGTG |
| 04 | | | TGAGCGCTGACATGTT |
| MI12 | 8 | 81285916 | CAATTCTAGCATCGAAGGGTGTTATGACGCCTGCT[A/G]CAGATGTGGCTATACCAAG |
| 05 | | | AAGTCCAAAGGTTAGA |
| MI12 | 8 | 83917520 | CGACGATCAGGATTAAAACGATGAAGGGGTATCCT[C/T]TGGTCCAATCTAAGCCGTC |
| 06 | | | GAAACCCAAATCTACG |
| MI12 | 8 | 84511152 | CTCTCACATCCCCCTTGCACCCTTCTCTTCCTCCT[A/C]CATCATCATCGACGATGGGTC |
| 07 | | | GGTTCCCATCGTCA |
| MI12 | 8 | 89846444 | AGTCCCTAAGTTGCTGTCCAGGATGAAAGCTCTTT[C/T]AGATTCGTCTAGTGAATCTA |
| 08 | | | CATTCCATGAATAGG |
| MI12 | 8 | 90089863 | TTATTTGTAATATAGTAGTGTTAACTCTTTTTTTT[G/T]GGTCAAATTGTATACACATGA |
| 09 | | | ACTACAAGATATGT |
| MI12 | 8 | 95162209 | CTTATACGTACTCCTGTTAACAGTGGACGGTCAAC[G/T]GTGTGCCGGAAGGCTTGAA |
| 10 | | | CCAACGCGGGATGAAT |
| MI12 | 8 | 95686554 | TTGTGTTGTAATAGCATAGAGTAAATGTTCTACAC[C/T]AACGTGTACTGCGCCACTGT |
| 11 | | | CAGTGTACGCCATCA |
| MI12 | 8 | 97299686 | AGCCTTCGCTTTTTGCCGTGAGGTAGTGTACGTTC[C/T]GTTGTCTTGGAACGAAGTC |
| 12 | | | CCTTTCAATGTTGTGC |
| MI12 | 8 | 99146526 | TCCCTTCTCTGCGGGCCCCGTCATTTTTACTTCCA[C/T]GTTGGGAACCCGCGTTGGCT |
| 13 | | | GTCAGGCCCAGCCGC |
| MI12 | 8 | 10136652 | ATGTGCTGCTGTTTTTTTTTCCAGCATACTCAAAT[C/T]CGTATTGTGGCCATAACTCTT |
| 14 | | 3 | AGCTCCGAACTATG |
| MI12 | 8 | 10170877 | ACGAAGTCATAGACTTACAGTATACTCATGGCCTA[C/T]TGAGCCTAGACCTGAGTCTC |
| 15 | | 2 | CTGACGACTTAAGGA |
| MI12 | 8 | 10177543 | CCTTCCTGCTCTACGAAACCTTGAAGGTAGGAGAG[A/G]CGAGGGATATGGGTCCCTG |
| 16 | | 3 | ATTTACTGCCTATGGT |
| MI12 | 8 | 10277579 | TCATGAAGTAGCCTGTTGTTTCAGGGAAATCCTCG[A/G]CGGAGACCTCCTGCTCCGC |
| 17 | | 1 | TGGCTTTGTCGGCTCC |
| MI12 | 8 | 10283300 | CGAGAATATCTATCCTCACTATTGGTCTCATTTTC[A/G]CTACTTCGTTAGGCACTATGG |
| 18 | | 2 | AATCTGTTTATGGA |
| MI12 | 8 | 10422115 | CTGTCAGAAAAAGGAAGGTGTGGACGTTCTACCGA[C/T]CCGACTGGACGGTCCGCG |
| 19 | | 8 | GCCTAGCAACAATAACA |
| MI12 | 8 | 10639899 | CTGTCGGATCAAGATCTAACGGCCGATCTCGCCCT[A/G]TACCGCTTCGGCAATGGTAT |
| 20 | | 5 | TTTGCCCCTGGAACC |
| MI12 | 8 | 10679391 | AACATAGCTGCTTCTTCATGAAGATCATCACTGGA[A/G]CTATCATCATGACTTGAGCT |
| 21 | | 6 | ATCAATGACTTTCTT |
| MI12 | 8 | 10720601 | GGGGAGGTGGAGAATGTGAAGTGAGTCTTGTCAAA[G/T]ACAATGTGATGAGAGATG |
| 22 | | 2 | ATGATCCTATGGGAGGA |
| MI12 | 8 | 11051527 | TCCACTTGGTGAGAGTGCGTCACAAAGGACTGAAA[G/T]AAGAAACAACGAGAAAC |
| 23 | | 9 | GTGTGAATCGCCCATTAG |
| MI12 | 8 | 11259768 | ATGAACAAGTATTGCATGACAGGTGTATTAAGTGA[A/G]TGAAAACATATAAAAAACA |
| 24 | | 9 | CACAAGTCATCAAAAG |
| MI12 | 8 | 11435262 | GAATTGAATTTGTTAAAGACAGATAGGATAGCTAC[C/T]GATTCTAGAGGCACAGTTG |
| 25 | | 0 | GTGGAGTTGATGATAG |
| MI12 | 8 | 11488707 | GTACCGAAACAGAGGCAGATAAGGATCCTTTGGCA[C/T]CCAGCTGAGGGAACACTC |
| 26 | | 3 | AGAAGAAGCGTCGGATG |
| MI12 | 8 | 11493860 | GGAGTCTTCGTCTAGAGATTTGCTGACTGAGACGA[G/T]AGGCAAGAGAAGAGTTAG |
| 27 | | 1 | AGTACCGAAGCGAAGAG |
| MI12 | 8 | 11654559 | GCCCAACCGGGTATGAGAATGCTAGCAGTAGTAAG[A/G]TGTTGACACATTTTTGTCA |
| 28 | | 2 | CCAAACACTATAATGA |
| MI12 | 8 | 11696555 | ACTGGTATTGCATTGATGATGAGTACTCATTTATA[A/G]ACATGGTGCTGCAACTGTTTT |
| 29 | | 8 | GTAGTTGATCTACT |
| MI12 | 8 | 11805593 | AGAGTGAGGTGCAGATCTTACGAATATTGGAGGTA[A/G]ATATTCTCGTTGTTTGTTTC |
| 30 | | 4 | ACAAAATGTAACGTA |
| MI12 | 8 | 11830131 | TTGGAGTACAAGGCAAGATAATATGGCTTGGAGTA[C/T]AAGGTAATTACAAATCTAA |
| 31 | | 3 | AAGATATACCTAGATA |
| MI12 | 8 | 11957820 | TGATGCATCATGTGACAAATAAAGAAGGTCTGAAG[C/T]GTGTTGTTAGAGAAGGAGC |
| 32 | | 4 | CAAGGAATAATGTCAT |
| MI12 | 8 | 12013736 | CCGCAGACGACGCCGGATCAGCGTGGTAGCCCGAG[A/G]AGGCGGTGGACTGGCCG |
| 33 | | 0 | GGAAAATAAAGCAGGATT |
| MI12 | 8 | 12165724 | AGCACAATTTAGATCTTCAATTGGTTTGATGAAAA[A/G]GACCACATCATCTGCATAAA |
| 34 | | 9 | TGGAAACTCTACTAC |
| MI12 | 8 | 12373792 | CTCCGCCCATTTCTCAATTGATCCGTAAAATGCAT[G/T]TGGAATTTGTGCATCCAAAC |
| 35 | | 4 | TAAACTAGGAAACAG |
| MI12 | 8 | 12475688 | GTTTCGAGAGAGCGATGGCGATCGATGCGGATGCT[A/G]GCAGGGTGAACTCCGCAC |
| 36 | | 7 | GACTCGCGAAAGGGACG |
| MI12 | 8 | 12540902 | TTGGCTTTATGAGGTGAAAATATGGGGATTGTGGT[C/T]GGAATCGAAGAAAGTGTAG |
| 37 | | 2 | ATCGATTGAAGTACTA |
| MI12 | 8 | 12562987 | AGCGCACGGGGCGCGGATGCGCGTGGCTGACAGGT[A/G]AGGCTAGGGTGGATGATC |
| 38 | | 4 | AGGATTAGGTACAATTT |
| MI12 | 8 | 12598927 | AGCTATGGAAACACAAGACAAACGGATCACAACGT[C/T]GTGCGCCTCATGTTAAGGT |
| 39 | | 4 | CATTTACTATAATTGA |
| MI12 | 8 | 12726396 | GTTCTTGAGGTGGTTGGCGACCACAAGAATGGGAT[A/G]TGTTGGTACTTGCTCTCCT |
| 40 | | 7 | GGGCAAGTGGATCCAA |
| MI12 | 8 | 12807645 | ATATTATTATTATATATTCCCTTTGTTAGCCTTTC[A/G]GTTTTGTAATGATTACACTAA |
| 41 | | 3 | ATCCTCCATCCTCC |
| MI12 | 8 | 12865510 | GTTTTATGCAGCCATAGCCATCTCATACGAAGCGC[C/T]CAGCTCAACTCATGCAGGCT |
| 42 | | 2 | GGAAATACCCAAACC |
| MI12 | 8 | 13106498 | CATTTTCTTTGAAGGCAAGCTCCGTTTGGTCAGTG[A/C]ACGTGTCCAAGAGAACCAA |
| 43 | | 1 | ACAGCGTATGGATGGC |
| MI12 | 8 | 13121438 | AAAAAGACGGCATCTTGTTCGGCCTTTTCTACACT[A/C]TTCTCACAGCTGGTGAATTT |
| 44 | | 4 | TTGGTTCTGCATTCT |
| MI12 | 8 | 13213376 | GTAGCCCCTTGTGGAATGAATTCATTTCTTTGTAA[C/T]GAGTTTAGATTGCAAAAAAT |
| 45 | | 2 | AAAATTGGGAGGTCT |
| MI12 | 8 | 13280677 | TCTCCACGGCAGTTGGGGGTATTACTGATCCACAA[A/G]CAGCTACGGCCTGGTTCGT |
| 46 | | 1 | TTGTGCTGGATTGCAT |
| MI12 | 8 | 13337200 | CACCTCTGGCCATGGCAATGGCGCCGGCGCCAGGA[A/G]GCGGGATGTTCCAGCTAG |
| 47 | | 8 | GTCTAGTGGACACCACC |
| MI12 | 8 | 13360080 | CATAATTTGACTTCATTTCTTTTGCCGGCATTTTG[A/G]TACCGCGAAGTAGCATGAAA |
| 48 | | 8 | AATACAGGTGTTCTG |
| MI12 | 8 | 13416685 | TAACATAGTGAGGAACTTGAGAATTTATAATCATG[C/T]GTTTAGCGACCTTATTATTAG |
| 49 | | 8 | TGCATAGAGAGTGA |
| MI12 | 8 | 13530553 | GTTGGCTGGTGGCACCAACTCATACACTGTTGATT[A/G]CTTAAAGAAAGCTGGTCTT |
| 50 | | 2 | TTCCAATCATCAAATT |
| MI12 | 8 | 13548730 | CTCTGTTAAAGAAGATTAGAAGAAACATATCCTCT[C/T]AACTTTTTTTTGAACTTCAA |
| 51 | | 5 | TCATAATGCTTCTCT |
| MI12 | 8 | 13708949 | CAAATCCTTCTGACAGACTTAATGGGTGCATGTTT[C/T]AGTTAACTGAAACTGGTTGC |
| 52 | | 1 | AGTGAATGGGGTCAA |
| MI12 | 8 | 13728672 | TCCCTTCCGTTCGCGCAATTTGGTTTCCTTGCTCA[G/T]GATTGTGCCTTTGAAATCGT |
| 53 | | 5 | CTATGCGGGCAACCT |
| MI12 | 8 | 13750458 | TACCACACCTCTCACGTAAGATGGCGCATAGGTCC[A/G]AAAAGGATCTCTTAGTTATA |
| 54 | | 6 | CGCAAACTATCATAG |
| MI12 | 8 | 13818134 | GTTGAGGACACTGAGAAGGTCAAGTCGCTGAGTGC[C/T]GAAGTTGACCGCCTCAAG |
| 55 | | 3 | GTCTCTCCTTCACACCA |
| MI12 | 8 | 13915711 | AGGCACTAGTTCCTCACGAATCAAGACACACTCTA[G/T]TTACTCCAGTTAACACAAG |
| 56 | | 5 | TTACTTCAGTTAAGCA |
| MI12 | 8 | 13963506 | CCGAAGGATTTTTTGTAGATAGTGAAAATGTGGTA[G/T]ATGGTGGAGATGAAGAATT |
| 57 | | 1 | GTTTGAAGATTTGGTT |
| MI12 | 8 | 14075496 | TTCACAAAATATCAAATTTCATACACCAGATTCAT[C/T]CACATTCACATCCACGTACAT |
| 58 | | 1 | TCTCAGCTGCAACG |
| MI12 | 8 | 14298608 | ATTCTCTGCCCCCTCTATTCTTGCAGTACATGAAT[A/G]CCTTGACATATTTAACAAGTG |
| 59 | | 1 | AAGCCTTTTCTAAT |
| MI12 | 8 | 14377509 | TCAATTCGTCATGTTTGATTGATTGCCCTAATGCC[A/C]TCAATCGAACAACAACTGTT |
| 60 | | 8 | AGCCGTCATCAACCC |
| MI12 | 8 | 14615922 | CGCCTGTTTGCTGCTCTTCACCTGGTTTCATCATG[G/T]GAAGCACGTACTTTTAGGCC |
| 61 | | 8 | ATCACGACACGAACA |
| MI12 | 8 | 14633216 | GCCTATTGCACCTTGGCATGCTTGGGAAGCACGTG[G/T]ACCTTGTCACAGGTCTTGC |
| 62 | | 4 | ACTACTCAGCCATAGT |
| MI12 | 8 | 15007793 | ACCTAAGGTCATTAAAGCATCGACAGAGTAAGGCC[C/T]CATTACGGTGGTGGCACCA |
| 63 | | 9 | GCGATGACATCTGGAA |
| MI12 | 8 | 15134615 | GATAAAATAAGTCAAAAAGTGAACCGTGGAACCTT[G/T]ATCACATCCAATCTAGGTC |
| 64 | | 6 | CCTGGCCTTGACGATG |
| MI12 | 8 | 15223402 | TTGGACGATCTGCAGCCAACCCACTGCCCTCGAAC[G/T]TCACGCACGATGTAGTTTT |
| 65 | | 9 | TAGTGGAGGAATAAAT |
| MI12 | 8 | 15378368 | ATATGTCAGGTACATAAGCTATCACGTGACACAAC[A/G]CAATTAGTACTAGGTAACAG |
| 66 | | 5 | AATTGCGGGCGAGGC |
| MI12 | 8 | 15547851 | GGTCGGACAGCGGGCTGGGGCCTGGGGTCATGCAT[A/G]CGAGTATGGCAAGTGGCA |
| 67 | | 3 | GCAGCAGCTACGAAACC |
| MI12 | 8 | 15662978 | GAGATTATGCATGGGCTGACGTGAGCGACGGAGCA[A/G]CGATTGTATATGATGATATC |
| 68 | | 8 | GAGCTGAGCCCGCGC |
| MI12 | 8 | 15887806 | TTAGGAAGAGTAAGTTTATGTTTTCCATTACAAAG[G/T]GGATCCTTTTTTATTGGTGG |
| 69 | | 0 | GTGGGTGGGTGGAAG |
| MI12 | 8 | 15924864 | CTCCAGATCCTGAAGTTTCGCATATAAGCCCCCCT[C/T]TTTCGTTCATTAAGGGTAAG |
| 70 | | 8 | TTCCTTATCTATCCA |
| MI12 | 8 | 15993863 | AATCACACAATTTTCAATATTGCCACACTAATAAA[A/G]ATAAGATGAAATGAGGAATA |
| 71 | | 0 | AAATATGATCTCCCA |
| MI12 | 8 | 16110739 | TGTGAACTGAGAACCTCGATCGGCTTTTGCCCTAA[C/T]AATCAACCTGATTTGACAC |
| 72 | | 7 | TAGCTGCATGCCTAGA |
| MI12 | 8 | 16132870 | AGTACGCCTCGGAATCAGAGGAGCAGCGAGGAAGC[C/T]GAAGGAGGGGCGAATCT |
| 73 | | 1 | AAGCCCAATTGAAGCATG |
| MI12 | 8 | 16177738 | TTAGATCATGTGAACTCGTAACTCTCTGTATAAAG[G/T]AAAAAAAAAACATAATGAA |
| 74 | | 3 | CTCCTGGCAAAGCGAT |
| MI12 | 8 | 16207874 | GATATAAAACCGGGCTAAGAGATTGGCAACACCCA[C/T]ATCCAGCATGCGTCAGATG |
| 75 | | 0 | TAGTACCTACCACGCG |
| MI12 | 8 | 16357270 | CAGATTTGGTGCCGGCAGAATAATGTCAAGGAAAC[C/T]TCATAGTAGTTTATTCGATC |
| 76 | | 6 | AGTACGCAGATGCAG |
| MI12 | 8 | 16440974 | CTCAAGTTCTACGTCGGGTACTCTGCGTGGGACCA[C/T]GACCAGCTGCTGAGCGAG |
| 77 | | 6 | ATCGACGCAGGTTACTG |
| MI12 | 8 | 16441796 | GTGTTGCTTTTTGCCGTTGGCTTCTGTCCTGCCAT[A/G]AATTTTCTACTGCCAGTACAT |
| 78 | | 3 | CATCGGATGCCTGA |
| MI12 | 8 | 16517923 | AGACGTTTTTTCTTCTTCGAATTATTGGCATCATG[C/T]TTATTGCTTTCAAAGTTCTTG |
| 79 | | 4 | GATCATACTACCAC |
| MI12 | 8 | 16578156 | TGGGAGACCCTTATCTATATACATGAATGAACAGT[C/T]GAACACATCAAAATTCTCTT |
| 80 | | 5 | GCAGTAAGATGAAAA |
| MI12 | 8 | 16601836 | TGTCGCTGAACTACAAAGTGGTCGTAAAAGGAGAA[C/T]ACAAACATCACTGCGATG |
| 81 | | 2 | ACACGCTCGCAGACGAA |
| MI12 | 8 | 16701394 | TTGCAATTGCAACAGAGCATCCACCATGGTTTCTT[A/G]CCTCCAGTATCAAAAAGGA |
| 82 | | 8 | AAGTAGCTTCAGCATA |
| MI12 | 8 | 16782261 | TAACATCGTATACGGATCTGGTTCTTCAAATCTAG[C/T]TTGACGATATAAACCAGCATT |
| 83 | | 2 | TCCTCAACGTCTTC |
| MI12 | 8 | 16896697 | GTGAAAGCAACTGGTACAATGCCATTTATGGTGAC[A/G]GAGACCAGGAAGACGAAT |
| 84 | | 3 | GGCGTGAACTTGAGGAA |
| MI12 | 8 | 17040587 | TTGCAAAACCACCATTAGCAACAAGATTCTTCGCA[A/C]AGCCTTTTTTTTCTTGGTAA |
| 85 | | 2 | CCAACATTGTTCGGT |
| MI12 | 8 | 17131421 | CTAGCACAAGCGCCATTCCCGCTGTACCGAAGTAC[C/T]AATCCAGCATAAATGGCAA |
| 86 | | 9 | CGAAAGCCGCATCCTT |
| MI12 | 8 | 17141016 | ATCTAGATCATACATACCCTAAGATTGTCATTGTC[A/C]TGTAACGCCGTAGCTGGCTAA |
| 87 | | 4 | TCACACGAATTGCA |
| MI12 | 8 | 17178628 | CGCGGCGCTAGTACTGCCTTTGTACGGCACATTTC[A/G]ATCAAAGGTGTGCTTGGCA |
| 88 | | 8 | TTTCGAGGAGAGACCG |
| MI12 | 8 | 17261601 | ACAAAATTCCCGTAAGTAATGAATTTCTCTCATTC[C/T]TTGTCTCATTGCCATTATTTT |
| 89 | | 7 | TTTCCATTGATACA |
| MI12 | 8 | 17361403 | CAGATCGAAATAGACTCCATGTGTGTAGGAGTAGC[G/T]ATAAATGTCAACTTGTAAA |
| 90 | | 3 | ACATGATCCCATCATC |
| MI12 | 8 | 17370661 | AATAATCCCATTGTGAAACAATGATTAATGGTGGC[C/T]ATGTTTGTTTTACCTGAGTTA |
| 91 | | 7 | TGTTGAGGAATTAG |
| MI12 | 9 | 478409 | GCTCAAATGGATGGGTGCAATTTTGTAAGTGACAT[G/T]ATAATAGATGGGCATTAACA |
| 92 | | | AGGTACTTATGATAT |
| MI12 | 9 | 623042 | CATTTATGACCGAAGGATCTATGATCAACGACCCG[A/G]GAGTTTAAAGTACTCAGATT |
| 93 | | | GCCCCCCATACACAC |
| MI12 | 9 | 676228 | GATGTCCTTCAAGAGAACATTAAGGTGGTGTACAC[A/G]CAATTTTGCAATGTGTATTG |
| 94 | | | AGCCTTAGGGGAGGT |
| MI12 | 9 | 1030551 | AGTGACCCTTAAATGCAAATAAACTGCGTATGGTG[C/T]GTCCCCCAAGTCCAAACTG |
| 95 | | | CATGCATGCTAAGGTA |
| MI12 | 9 | 1428595 | TCGTCCGAAGTGACGGTTCTACCCTCGCGTTTCTT[C/T]CACTTTTTGTTCTCTTTCCG |
| 96 | | | GTCGCCCACTGTTCT |
| MI12 | 9 | 1432544 | TGGTTCGGGCGGGCCAAGATATGTGTGCGGCACTC[A/G]TCTCCTTGCCATTGCTTGG |
| 97 | | | TTTTGGATAGGATCGC |
| MI12 | 9 | 2517288 | CGACTATTTAGTCCATTTCTACGCCTTTGATCGTA[C/T]GTGTGGCATGTGTTAATCTAG |
| 98 | | | GACCAATAATCTTC |
| MI12 | 9 | 2714062 | TTTTGCTGTTGGTGCCATATGGCGAGCCAGTAAGT[A/G]CTCGCTCTCCGGGGAGTATT |
| 99 | | | TGTGGCGAACGGCGA |
| MI13 | 9 | 5158723 | AAAAACTTCATCGTGTCTCACCTCACACCACATAC[A/C]TCTGCATGTCTTCTCCACCT |
| 00 | | | ATCTCCTCGCCACAT |
| MI13 | 9 | 6065561 | GCTGATCTTGCATTTTGAGAATTGTTGCCCCTGTT[A/C]TGCTTCTTGATCGTTTCCTCA |
| 01 | | | AGACTACGACCACT |
| MI13 | 9 | 6980945 | GACAGGGACTCTGATTCCACTGCGACATACTCAAC[A/G]TGATCTTCATTCCGTTGCG |
| 02 | | | ATCCAGGATTCGAGCA |
| MI13 | 9 | 7308828 | AGCGCAGAGCTAGCAAGTGACCGACCGAGAGCAAA[C/T]AGGCAAGGCAACGCAGG |
| 03 | | | CAAGATGGTGCAGCAAGC |
| MI13 | 9 | 7957610 | CTTCTACTTGTATCCTGACCTGCCTCTGCGGATAT[A/G]CCTATGCCTGGGTTTAATTTC |
| 04 | | | AGAGATTGCTTACT |
| MI13 | 9 | 8128069 | CACAAACCACCAAGCTATGATTGCCGCCTCAAGCA[A/G]TGGACGGCGGACATCTCA |
| 05 | | | AAGGATGTGCCGTACAT |
| MI13 | 9 | 8469608 | CCACGCTTGTGTCAATTGCGATCGAGATTTGCAAA[A/G]ACCATCACATCCTAGCTTCC |
| 06 | | | AATGTGGCAGCACTA |
| MI13 | 9 | 8973393 | AAATATAACTAAACTTAATAAATTGTTTGCACATA[A/G]CTGAATCCAATAATATACATC |
| 07 | | | GATGCATATATACA |
| MI13 | 9 | 9731764 | ACATCGTGGTCAATACCAATTAGCATGGTTTCAAC[A/G]CCACTGGTACTGACTAGTGA |
| 08 | | | CAGGTCCATCGATCG |
| MI13 | 9 | 9802449 | ATGAACATGAGTGTTTATTTATTCTCAGCACGGTC[A/G]ATATTTGTCATATAACTAATA |
| 09 | | | TATTGTACTTGCAA |
| MI13 | 9 | 10472496 | GGGATCGTCAGTTGAATTCGGTTTCTTCTTGACAG[A/G]CAAAAAAATGTTTCTTCTTC |
| 10 | | | TTTTTCGTTCTTTTT |
| MI13 | 9 | 10474313 | GACGAAATGACCTAATACAGGATTACAATTGTGCC[C/T]TTTACTGTTTACAAATTCCA |
| 11 | | | TTAGGGCAGTAGCGT |
| MI13 | 9 | 12348170 | CCTTGAAACACAAAAGCTCTGTCGAAATGCTGGAA[G/T]TTTGAGAAGAGAATCGAA |
| 12 | | | AATAGCATGCCTCGAAA |
| MI13 | 9 | 12875299 | AGACTCCAAAGAGATCAGATAGGACCGAGCTCCAT[A/C]AAAAAAACACCTGTTTCT |
| 13 | | | ATGCTTCCAAAGGCTCC |
| MI13 | 9 | 14207199 | CCGACGATGGGAACGCCGCTTTCTGGTACGCAAAC[A/G]CGGGTTCTGATGCGTGGAT |
| 14 | | | GCTGCCTTGTGTCGAG |
| MI13 | 9 | 15371489 | ATGTACAGGTTCCTCAATTCAAAATCACATACTCG[G/T]TTGCAAAAACACAACAGCC |
| 15 | | | GCTGTTCGCAATGCTG |
| MI13 | 9 | 16501382 | TCCTCTCTTACCAAGTTACCATTGCTATTGCTATC[A/G]TGGTTTAGGATCATTGGTGCC |
| 16 | | | TCTAGAGGTCTCCA |
| MI13 | 9 | 16684414 | GATTATTTTTCCCATCATTAGTTTGTTAACATGAC[G/T]ATCCGAGCTGGTGTAATATGT |
| 17 | | | ACCTAATATGAAGC |
| MI13 | 9 | 16689713 | ACCCTAGATATTGGCTCTTAGGGTTGATTTAGTGA[C/T]AAAGGGGATCACGGAAGATT |
| 18 | | | GGGAGAGATTGGAAG |
| MI13 | 9 | 17392234 | TACCATACATCCTCTTTTAATTGGATTGATGAAAA[A/C]AACTAAGTGTTCTTATGTACT |
| 19 | | | GTTTGAGCTTGCCT |
| MI13 | 9 | 17478403 | TTGTTAAGAATCAAAACAAGCAGACAACACGAGTC[A/G]CAATGACAACAAAATGTT |
| 20 | | | CAGACATAGATAACTAA |
| MI13 | 9 | 17649633 | AAAAATCCTCTTGCCTGTGACCTTCATCACAAACT[A/G]AACTTTTGGCAGTAGCAGA |
| 21 | | | TTGTAGGAGTTGGGCT |
| MI13 | 9 | 18628865 | ACACCTTGTGTTTGCTATGTCAGGGGAGGGGGGGT[G/T]CCATTCCAAAGCCATTTGA |
| 22 | | | AAATAGGATGAGCTTG |
| MI13 | 9 | 19238970 | AATCAGCACTGGACAAACGCATAACTTGAGGGCAA[C/T]GTCTCAAATGCAATTTCTC |
| 23 | | | AAGAGATGGCATATTG |
| MI13 | 9 | 20300953 | ATGAGAGGAAGTTGAGGAACACAAGACACAACAAA[C/T]AGCATAAAAATAGATGAA |
| 24 | | | TCACACGAAATGAAATG |
| MI13 | 9 | 20403999 | AGCACTGCGAGGAGCAAAACAAGGAATTACTTACA[G/T]CGAAACAGGACCACACTG |
| 25 | | | GTATTAATAAGAAAGAA |
| MI13 | 9 | 22110801 | GACTACACGTACGGAAATGCTACCGTACGTATAAC[A/C]CAAACACGACATGGACGGA |
| 26 | | | TGGACCTGTTGTGGTC |
| MI13 | 9 | 22490903 | GCGCTCCTTCTGCAGGCTTCCTTCTGCTGGAAATG[A/G]TCGGTGCTGAGCCTGCTAT |
| 27 | | | CAGAAACCTCCAGCGA |
| MI13 | 9 | 22792882 | CGACCACTACACGTAATACTTCTAATAACGCCAAC[A/G]TGCAGCGTCTCGCTTTTATT |
| 28 | | | ACAGTCTTGCTTTTA |
| MI13 | 9 | 23103530 | CCCCTTTTCCATTATCTAGGCATTCTAGTGAACCA[C/T]ATAAAATTATGCAATAAGGAT |
| 29 | | | TGGGCTTGCATTAT |
| MI13 | 9 | 23287230 | AATCCGAAGTGCTGCATTGCGCGCGCCTTTCTTCA[A/C]AGAAATCATCATCCTAGCCT |
| 30 | | | TTTAAGCTAGAGTAC |
| MI13 | 9 | 24964933 | GTACCCCACCAGTCGCTCATTGCGTTACGATCTAC[C/T]CACTGATGACAGTTCACGGT |
| 31 | | | GGAGTAAGAGCGTTG |
| MI13 | 9 | 27995821 | TAAAGATTGCTCCAAAGAGGAAGATACTATACTTA[A/T]GCAACAGCTATATATAGACG |
| 32 | | | ACGACGTTATTGATC |
| MI13 | 9 | 29222396 | GCCTGGACGAAGTATCTTTCGCTAGTTTGCTGGCT[A/G]GGCCAGAGGTAAGCCTGCC |
| 33 | | | TGTCTGTTATGGTGTT |
| MI13 | 9 | 31994112 | CCACGTTTTGACTCATGTGAATCGAATTGAAAAAA[A/C]AAGACAGGACACAAAAGC |
| 34 | | | TGAATTGGAACATAGGT |
| MI13 | 9 | 34213081 | TAATTCATTCAATCATCCAATTCAAAAATATGTTC[A/G]CATAACATATGATACATCACT |
| 35 | | | TGTGCCACCAACTA |
| MI13 | 9 | 35419946 | ATCTCGTAGAATTACTCGAAGTAAGGTTATTGTCA[C/T]GGAACCTCCCAAGATATTAG |
| 36 | | | GCCCACCTACAGATG |
| MI13 | 9 | 36918458 | TTGAAAGATGTCTTGGCTGCAATGAGAGCTCTCCT[G/T]AATTGGAGTTCTGTACTGA |
| 37 | | | CCTGAGGTTTGAAATC |
| MI13 | 9 | 39454399 | CGATGAAGGCACACTACTTCCTTCACTCGGTACTA[C/G]GGGGTAGGATTGATGAAAG |
| 38 | | | GAACTTGAGGGGGACG |
| MI13 | 9 | 41506113 | GATTCTTGTACTAAATCACATGTTCCAATCCTATC[C/T]ACGATGGTGTTAAAAACAATG |
| 39 | | | TAAGTAGTTTGATT |
| MI13 | 9 | 41752587 | ATACAAATCACGATTATAAAAAAGAAAGATAACAT[C/T]CGATCATAAAACTTGGTCCG |
| 40 | | | TAGCTATCATATAAA |
| MI13 | 9 | 42395700 | AATTAGATTTTATTTTGGGAAGCCAACGTTGCTAA[A/C]TTAACCATGAGGAACTTAGT |
| 41 | | | TATGATACTAAAAAG |
| MI13 | 9 | 43529871 | CGTAATGGGGAATCAGGGAATGGATCACTGGTGCC[C/T]GGTAGTATAATATATTAATA |
| 42 | | | GGTGGTTACTTAAGT |
| MI13 | 9 | 44287501 | AAAATAAACACATCCAAGACTTGAGAGAGGAAATA[G/T]AAAAGATGAAAACAAGTC |
| 43 | | | ACAATGATGAAGTCTCT |
| MI13 | 9 | 44448552 | GGTATAGCCATGGAAGCTTGTACAGCTTGCAGCCA[C/T]GCTTTCCCGGCTTCTCTATA |
| 44 | | | AAATGCAGGCACTGC |
| MI13 | 9 | 44481789 | ACCGCAGAGGTCGCCCCTACGCATCCATCCATCTT[G/T]TAGTGACACTCTCCCCCCTC |
| 45 | | | AATGAAGCGACTCCC |
| MI13 | 9 | 46067346 | GTCCGGCCGTGGCGCTGGCGTGGATTGGCACGCAC[A/G]GAGCGGCCAATAGTGTGC |
| 46 | | | CCTATGGTTCAGACCCG |
| MI13 | 9 | 48736962 | CTCATTATTCTTGTGGATAGCTACCTGTTCTGGAG[C/T]ATTGTCCCTGGCTTCAACCAC |
| 47 | | | TGCAAATGGTACAA |
| MI13 | 9 | 51635692 | GTGTTGTCTTAGTGACCTCGCTTTCTTCTCCCTCA[C/T]GAGACACCCTTGCAGTCGAA |
| 48 | | | CACACTCTGGCCATT |
| MI13 | 9 | 54923746 | ACTCAATTACTATGCCACACACCAAGCTCGCAACG[A/C]GGCGAATCATTCTAATGAC |
| 49 | | | TTGATTCATGTGTAAG |
| MI13 | 9 | 58147970 | GGCAGGACAAGACTTGCCATCCTCAAGTACAGACC[A/G]CGACGAAGAACAGCACG |
| 50 | | | CCACTGACAAGGTAGAGA |
| MI13 | 9 | 59257189 | GAAATCAGCTTAGCCGGTTTTTCTGCACAGCAGCT[C/T]GAGGCGATCCCAAAAGGTG |
| 51 | | | ATTTTTGGTTAAATCA |
| MI13 | 9 | 60412694 | TGGAGCGCCACTGGCGATTTTAAGATAAGGCACGG[A/G]CGATTGCTGCCTAGTCAGC |
| 52 | | | AGTCACTCATGAGCAC |
| MI13 | 9 | 63258589 | CGTGTTTCTCTACTTGACGGAAGAACTTGCCCCAC[A/G]TTCAACAGACGACGTGATT |
| 53 | | | TTTACTAAAAATATTG |
| MI13 | 9 | 64535376 | GTTCGGTTATTAGCCCACGCGTGCAGAAAGTGGAA[G/T]CAGACCAAGAAGTGGGAA |
| 54 | | | CCTAATTGCCTTGTTTG |
| MI13 | 9 | 65143208 | ATGCTTTGGATATTGGATTTGAATATGGATATACT[A/C]CTGTGATGTGGTATGCTGCTT |
| 55 | | | GTGCTTGGCTAATT |
| MI13 | 9 | 67923649 | GTCACTGAAAGGTGTTAAGGCTGCTGGGTATGAAC[A/G]GATGACTGCTGTTCAGGA |
| 56 | | | GGCTACTCTTCCTATTA |
| MI13 | 9 | 77479105 | CTCTGTGTTCGTAATTAATTTGCATTTGCTCTTGC[C/T]TGATCAAATCAAAAGCGATCG |
| 57 | | | ATAACCTATACACA |
| MI13 | 9 | 78560665 | CTCCATCCCTATCTACCAAAGCTAATGTTCACACG[A/G]TTTCCCCTAATTAATTGGTTA |
| 58 | | | ATACCAGTGTAATA |
| MI13 | 9 | 78707863 | CAGTGGTAAACAGAACGGTACATTGAATATTTTCT[A/G]GGAAAAAACTAGGCTATAC |
| 59 | | | ACATGATGAATACAGA |
| MI13 | 9 | 79061255 | AACCGGCAGAGCACTGGCACACATTATAAAATTTC[C/T]CGAGGCGACTACGGCGAG |
| 60 | | | GCATCGACTTCGCCATG |
| MI13 | 9 | 80060290 | AGTGTATTTGAAAATATATTAGGAGAGGTGGAAGC[A/G]CCGTTTTGAAAGTTGATGC |
| 61 | | | ATAGTGGAAGGATTGT |
| MI13 | 9 | 80077685 | TGTATATAATTGGTAGGAAACTTGGTCCAAAGATC[A/C]TATCTTCTAATCTGAGTTCTC |
| 62 | | | AGACTTTGTTCCAA |
| MI13 | 9 | 81196419 | AAAAACCGAGATGACAACACGAGGTTGAAGTGTTT[A/G]ATTGGAAGGTAAGTTAGT |
| 63 | | | GATAGGTTAGAGGTCTT |
| MI13 | 9 | 81588241 | TAAAATTTGAAGACATTTAAATTGTACGTGGGCAT[A/G]TAATTACCCACTGATAAAGC |
| 64 | | | GAATGACTGTAACAG |
| MI13 | 9 | 81819115 | TGCGCCCCGTCATGGAAGCTGTGGGCTGTGCTCAT[A/G]TCACTCCCCAAGTCCCTAG |
| 65 | | | ACCCTAGTCCTCGTTG |
| MI13 | 9 | 86236968 | GCTTGTTCGACTATTGACAATATCGTTGCATTCTT[A/G]TTTGCGACAGAGTTCTCGAA |
| 66 | | | GCAAAACGATCGGAT |
| MI13 | 9 | 89166548 | GAGTACCTCGGCGGCACTCCGCAGCCATTCGTCGA[C/T]CTCTCCACCAATTTCTACA |
| 67 | | | CCAGGTCCGTCCATCG |
| MI13 | 9 | 89759159 | AAAAAGAAAGACAAAATAAAACATAAATGTAGAGG[C/T]AGAATATACTAGTTGTGCA |
| 68 | | | TTAATTAATAAATGTT |
| MI13 | 9 | 92253578 | AACTAACCTCAGAACACCTGATATTCTCTCTTTAG[C/T]AGTTGGCATAGCTCACCCTT |
| 69 | | | CAGCCAGACCACCCG |
| MI13 | 9 | 92879547 | AAATAAGAGAAGCTTTACTTCAAGTATCTGATACC[A/G]ATAATGATGAGATAATAAGT |
| 70 | | | AGTGAGGCTAATTCC |
| MI13 | 9 | 94091703 | CCATCACGAGTAAATCCGGTGGCGGAGCCGGAGAG[A/G]GCTCGATGCCGATCACGA |
| 71 | | | GCGATCCAAGCATCCAA |
| MI13 | 9 | 95642497 | GGAGATGATCCACAGGTCCCACGGAGTCGTGGGCG[C/T]GTGCGAGGATGACTCAGA |
| 72 | | | GGACCCACACACCAGTG |
| MI13 | 9 | 96347765 | TCCCTTCAACCTTCCACCGAGTTTACCATGAAGCC[A/G]CGCGCATGCCTCATGACGG |
| 73 | | | ACTCGTCGTGGAAATC |
| MI13 | 9 | 96456258 | GATCAAGGCCTGACCTCACCTTGGAAGCTTGGATA[A/C]GAAAGCAGAACAACAATC |
| 74 | | | CTGGAGGCTGCTGAGTG |
| MI13 | 9 | 98516535 | ACCTCTAGACAAAGGCGACAACGTTTCTCGACGCT[A/G]GAGCTTCAAGATCCGGGC |
| 75 | | | GCGTTACAGCAAGATTC |
| MI13 | 9 | 98519851 | CCAGGTGGCACACGCGGTGATGCTGCAATCGTTGC[A/G]GCACATGACGATGTCAAG |
| 76 | | | AAGATTGCCGGAGAGGG |
| MI13 | 9 | 99367488 | AGTTCAAACACTATCTATTACCGAATGACTTCCAT[C/T]ATCCTGTAGTTCACCTACATG |
| 77 | | | CAAGGAGGATCAAC |
| MI13 | 9 | 10004550 | ACGCCCATTGATTGATGGAGGACTGACCCCTCGCC[A/G]TCTCGGTATCGACGCGCGT |
| 78 | | 5 | CTCGAGTCGGGGTGTT |
| MI13 | 9 | 10037552 | ATACCTCGATGTCTCTACCATTCCCTAATCCAATC[A/T]TAAATGATAATAAATAGTTTG |
| 79 | | 4 | AAAGGTGTCAAGTT |
| MI13 | 9 | 10044840 | GGGTGGAGCTTCAAGCCTATAGAGGAATCCCTCCG[C/T]GACACTGTTGAATCCTACA |
| 80 | | 6 | AAGCATTTGGCATCCT |
| MI13 | 9 | 10076738 | TTCAATTTTGCGCTTTGGAGTTGGAAATGAAATTT[A/T]GCATTCTTTCTTCTATGAATC |
| 81 | | 5 | AGGGAATTATGTGA |
| MI13 | 9 | 10597584 | AAAGCCTGACCTATTTTAGTCGCCAAAATAACACG[G/T]AGTAGTAGTAGCACACACG |
| 82 | | 4 | CATAGTGGCGTAATGA |
| MI13 | 9 | 10743074 | CGGACGCTGAAGGATCGGATCCCGAATATGCGGTC[C/T]CCTTCGATGTCAGGTATATC |
| 83 | | 5 | CTACGAGAAATGGCA |
| MI13 | 9 | 10803896 | TTTATTTCTCGTCGTAGAGAAAATTTATTCGCTCA[C/T]TGTATTAAGTAAAGATAAAGA |
| 84 | | 7 | TTTGATTCTCTCTG |
| MI13 | 9 | 10847740 | TGTTTTGGCACATGTGTATCAGGCGAAGGTTACTT[C/T]AACTTGGTCATGTAGCAAAG |
| 85 | | 9 | CCTTCACCCTCGCCC |
| MI13 | 9 | 10853269 | ACAAAGAAATGAAGTCATCAGAATTGTAGAAGTAT[C/T]TTACATACAAATAAATATTC |
| 86 | | 1 | TGTTAGGGAATCTGA |
| MI13 | 9 | 10854260 | AATGGATGGCCTACAAGCCACTAAACATATCCGTT[A/C]TTTTGAGAATACCGGCTGTT |
| 87 | | 8 | GGGACGTTTCTGTAA |
| MI13 | 9 | 10956439 | ATAATGTCAGACAGGTAATTCCAGCACACGTAAAT[C/T]AGTAATAAACACACATTCTT |
| 88 | | 6 | GCATGGACCAACAAG |
| MI13 | 9 | 11109064 | AAGATCAAACATATACGACGAATTAATTAACTTGA[C/T]CATTTTGAATTAAGTTGAATT |
| 89 | | 3 | CCTGTGTAACATGA |
| MI13 | 9 | 11303574 | AGTACTAGTACGCAGTTACTTCCCTTTAATTAATT[A/C]CATGGGTGCGAGATGCTGCA |
| 90 | | 6 | TTAGCATCTGTGGTA |
| MI13 | 9 | 11569224 | AGGCCCTTTACACCCACGTACGGCCCGGCCACCAG[C/T]CACCAGCCCAAAACAGAG |
| 91 | | 5 | CTCTCAAATCGAAACCC |
| MI13 | 9 | 11766068 | ACATGAAATCTACTTTTTGGAGTCAAACACTTCTC[C/T]ATTTAGCATAGAGCAGCTTC |
| 92 | | 6 | GCAAAGTTCATATAT |
| MI13 | 9 | 12041744 | TATACAACGCTGCTTTCTACCAAGTTAAACGAGCT[A/G]ATGTTTCTTTTTTTTTATCAT |
| 93 | | 4 | CAAAATCGACTGCA |
| MI13 | 9 | 12087933 | AAGTCCAAGAAGTTGGAACCTGAACCGGAAGCCAG[A/C]GATGTTAGAGAGGTTTTT |
| 94 | | 8 | AGTTTTTACGTTTCTAA |
| MI13 | 9 | 12184457 | GCAGAAGGCCGGCCGGCTACTCGAAAACAAGAACA[A/C]AGGAATCACAGCTGGGG |
| 95 | | 3 | CGCTATACCTACACACCT |
| MI13 | 9 | 12218789 | AAAATACTACACTTTTAAACAGGGCCTATATGTGG[C/T]GGTGGAACTACGTGGAACT |
| 96 | | 0 | AACCCTCTTATCATGG |
| MI13 | 9 | 12452199 | AACATTAATTTTACAAATACAATGTCATTCATTTC[C/T]AGAACATCAAAATTTAGTTGC |
| 97 | | 9 | TGAAATGAGCTTAT |
| MI13 | 9 | 12457286 | GACCGATGCTCGTCGACACGGGTACGGGGCGAGTC[A/G]GTCTGAGATACGGTGGCA |
| 98 | | 1 | CTTGCCACGCTTAGGTT |
| MI13 | 9 | 12575650 | TCTAAGTGTCTCCGCAGCCATTTGAGGGACAACCG[A/C]TATAGCAATGCTATCATGCA |
| 99 | | 7 | CGCATATGCATATGG |
| MI14 | 9 | 12747552 | ATAATAGTTTAATTCGTGGGTCGTAATTTTGTTTC[G/T]GACTTGAAACGCTTGCGCAG |
| 00 | | 8 | GCAGACAGGCAGGCC |
| MI14 | 9 | 12795064 | GGACGCTATTTGCAAGCTGAAATCGACGTAGGCGG[C/T]GAAATCGCAGTAGCAAAG |
| 01 | | 9 | ACTGCTGGGCCAGTAGA |
| MI14 | 9 | 12817985 | GGCATCGATAATGACGAAATGATGGCTTGCGCTTC[C/T]AGCCTCCGACTGCATTCAA |
| 02 | | 8 | GGCATCGATAATGGCA |
| MI14 | 9 | 12867316 | GACAGCAAATATGGTTTCAACTTCGAGGTTGCAAA[C/T]AGTGAACATTGTAGTAATA |
| 03 | | 1 | GGATCTACAAGGGTGA |
| MI14 | 9 | 12976485 | CAACTCTAATCGATATACTCCCTCTCCCTCGTCGC[C/T]TCGACCACATATAGAACTCGT |
| 04 | | 3 | CCATTGCTTCGTCG |
| MI14 | 9 | 13383791 | TTGATTTCTCTTGTGTTGGTTATACATATTTCTTT[C/T]GCGAAGGAATGACAAGGCACT |
| 05 | | 9 | AATTAGCGCTAGCG |
| MI14 | 9 | 13394714 | CCGGACCAGATCTTCAGACCAGCAAAGCAAGGAGA[C/G]GATGCCGTGCCAATGCCA |
| 06 | | 0 | TGCTCCAGTTGGGTGGC |
| MI14 | 9 | 13614391 | TCCAGTTTAACCAACTGGTCATGGCAAATCCTGAA[C/T]CCCGTTGTTAGGTGATTACT |
| 07 | | 1 | ACCGGCAAACCTTTT |
| MI14 | 9 | 13804120 | CCTTTTCCTAAAGACGTACAGATACGATCGAGGCA[C/T]TACACAGACACGTACGCTG |
| 08 | | 5 | GTGACACGTAACAATA |
| MI14 | 9 | 13810406 | CTGATCTGCTGAATTCTTTCGTTCCTAACAGTTTT[C/T]CCCCCAACCACAAGAAATTG |
| 09 | | 7 | AAGAATTGAAAAGTG |
| MI14 | 9 | 13826921 | CTCAGCTATAATCTGAAGCGGTCATTTCAAAAAGA[A/C]TGTCGCACCATCACCTAAA |
| 10 | | 5 | CAACGGGCTACTCTTC |
| MI14 | 9 | 13946970 | ATAAGAAAAATTAATGGTCAAAAACTTTTGTATGA[C/T]TTTTTTCTCTCGTCTAATATG |
| 11 | | 2 | ATTAACATTTTTCG |
| MI14 | 9 | 14059889 | TATCATTAGTGGAAGCCCTTCTTTTGTTACTTTTT[C/T]TATACCTTGTACGCTTATTGA |
| 12 | | 9 | CATGTCCTCATTAG |
| MI14 | 9 | 14103836 | CATAAGTTCATTGTATATAAGCAAGTAAATACAGG[A/G]AAATGTTCCCTTTTTGAGAG |
| 13 | | 8 | GAAGATACATAAAAA |
| MI14 | 9 | 14210399 | GGGTGAGATTGTGTATAGAACACTTTTGGGCTTTT[A/G]GCCAATTGTGTTGCTGCAGC |
| 14 | | 1 | CACATAAAAAATCAG |
| MI14 | 9 | 14307224 | GATGATGCACGGAACCCAACTGAACGAAAGACGAG[C/T]TGATATGGCATTGTTTGCC |
| 15 | | 5 | GCGCAACGCATCCGTC |
| MI14 | 9 | 14308023 | TCGAGATGTGCTAGACCGGACGCTCAACTACCGGG[A/C]TGTCGTCGTCGGTTCGCTG |
| 16 | | 5 | TCGGGTTATTTGAACT |
| MI14 | 9 | 14346603 | ATCAATCATCCTCAGTTCAGCTAGCGAAGTGATAC[C/T]ATGAGTGCTACATCTATGTA |
| 17 | | 9 | ACTTCATGCCATGTT |
| MI14 | 9 | 14477457 | CACATGATGTGCTTGGAAGAATTCTTAGACGTGGG[C/T]TCTTGGATGTTGAAGTAGAT |
| 18 | | 3 | TAAAGAAGAAAACTT |
| MI14 | 9 | 14478694 | GTTGTGTGGCACGATTGCGACATTATTGATCTTGA[C/T]GATTCTGTGAATCCATGGATA |
| 19 | | 8 | TAACGTAGTGTGTG |
| MI14 | 9 | 14537735 | GTTGGGCTAAAGTCTGTTGGCGCATAGTGAAGCTG[A/G]GTTTAGAAGAAAAAAAAG |
| 20 | | 0 | GTGACGATGGTGATGGT |
| MI14 | 9 | 14559303 | TATGCACCTGGACAGAGCCGTAGTCCCTTATATTT[G/T]ATAGGATGAAGGCAGTACAT |
| 21 | | 2 | GTTGTATGGTAGTAG |
| MI14 | 9 | 14602413 | GTGACCATATGTTGGGGCTGCAAGTTAAGAATAAT[A/G]TTAAAACAATTTATCAGATG |
| 22 | | 0 | ACTTGCTGAATAAAA |
| MI14 | 9 | 14753826 | CAAAGCATGAATGCTAAAAGTTACTGAAAGTGAAT[C/T]GCTAAACTTTAGCACCCAA |
| 23 | | 7 | CAACAGTTTAGCTACT |
| MI14 | 9 | 14780584 | GTATGTATCTCACCTGACACAGATGTGGCCTCCAG[A/C]CAGGTGTAGGATATGGATGC |
| 24 | | 3 | TGTGGACATAAAAAG |
| MI14 | 9 | 14815508 | CGTCTATGAGGCTATGACAGATTAGTCATGTGGCG[A/G]GAGTACAGAACACGCGTGA |
| 25 | | 7 | CAGGTTAGCAACCACC |
| MI14 | 9 | 15016351 | CTTTGTGGAATCACAGACTCTCTGTTTCAGAAAGC[C/T]TGACGTTTTCACCCAAAGG |
| 26 | | 4 | GTAGCTTAGGCTAGCC |
| MI14 | 9 | 15133947 | GTGCGGCAACTCGAAACTCGTGTGTCTTGGTTACA[A/G]AAATTAACGACGACCCTCG |
| 27 | | 1 | GTGCCAGAAGCATGAG |
| MI14 | 9 | 15151663 | ATAATTTTGGAAGAACGCACTGTTGCAATGCATGC[A/C]TGACGTTTTCCATCCAACTG |
| 28 | | 6 | CTAGGGTCCAGCACG |
| MI14 | 9 | 15272782 | GCTATACATTGAACTCCCTGTTCACTAGCAGCATC[A/G]TTGACAACAAAAGCACCAG |
| 29 | | 8 | CTTTCGCTGCAGGACC |
| MI14 | 9 | 15343143 | CTTGTACTAGCGCTGCTCTGTTCTTAGCAGCTCAA[C/T]GTAAAAAAGCAACTTTGTTA |
| 30 | | 1 | TAGCTCAATGTATAA |
| MI14 | 9 | 15595386 | TCTCCAGCACGTCCACCACCGGTTCACTTCCTCAT[A/G]TGTTCAGGAACGATCCGAT |
| 31 | | 6 | GGACAAGCTCGATTGG |
| MI14 | 9 | 15668272 | GTCCGTAAAGCGGTTCTAGGGTGTCGCATTATGGG[A/G]ATAAGGGAATGAAAAGGCG |
| 32 | | 2 | GCTGGTTGTGGGCGGA |
| MI14 | 9 | 15687369 | GAATTCAGCTAGATGCTTCCTTCGCCTCTGGCCTC[C/T]GCCTTCACTCAAGTTCTTGG |
| 33 | | 5 | ATGTTATCGTTGCCA |
| MI14 | 10 | 1150024 | CCGCTCATGACGTAGTTCCTCTGATCCACGTTGCC[A/G]AAGAAAGAACCTTCCATTT |
| 34 | | | TTTGATGCACAAGCGA |
| MI14 | 10 | 2667299 | AGAGAGAAAGCCCTATGTTTGGTTTTGTTAGTGCT[G/T]TTTCTTTGCTGGTCAAAACA |
| 35 | | | AATATAGTGCTTGAT |
| MI14 | 10 | 9274307 | CCATGAGGTATACGAGGCAGAGCCCTTCGGCCAGT[C/T]GTGTCTCTCGTGGCTAGAG |
| 36 | | | GTCCAAATCACGTTTG |
| MI14 | 10 | 9366532 | GGTGGTGTCCGAGCAGGTCGTTTCATGGTTAGTAC[C/T]TCGGCCAAATTGATAACCAT |
| 37 | | | AGTGTAATTCCACGT |
| MI14 | 10 | 11246795 | AATGTGCCCCATCATGTGGGCAAATGCCATAATGG[A/T]TTGCAGTCTCTTTCTGTACT |
| 38 | | | TTATCACGGTAAATT |
| MI14 | 10 | 12720998 | GTGGTGGCGGCCGACGTACGTGCAAGCAGATTGAT[C/T]AGAAAGAGAGAGGATGGA |
| 39 | | | TTGGTTGGTTGTTGTTA |
| MI14 | 10 | 13172473 | AACTTAATTTCCTGCAGAATAAGAATGTCAAAAGC[A/G]TCAGAATATTCAACTTGGG |
| 40 | | | AAGATCATCACGACAT |
| MI14 | 10 | 13562279 | AATCTCTGCTTGATGCTGGTGGATAGTGGGGGAAG[A/G]TTTCGATGAGCGGCTGCTG |
| 41 | | | GTGGAGCCGGGGAGAG |
| MI14 | 10 | 13791427 | TAATTTCGTTTCAGTGATTCACAGTACCTAGCTCG[C/T]GAAACCACAAATTCAGCTGG |
| 42 | | | ACTAGTCCTGCAGGA |
| MI14 | 10 | 14829973 | CCCCATTATTATTTTTCCATCAATCTCAATATTCC[C/T]TTGGATCTCTCTCTTTCAAAG |
| 43 | | | GCAAGGGTACACTA |
| MI14 | 10 | 15400809 | GCTTGCCTTGTCACTTAGCAGGTCTGTATTGCTTG[C/T]TCGGTGCCTGGCACCTTCTG |
| 44 | | | TAACATTGTTTTTGA |
| MI14 | 10 | 17390767 | GTCCCAACTTCGAGGTTCCAACGATGATGAATTCA[C/T]GGTTTAATGGTGGTGGCAA |
| 45 | | | GCTTTTCTCCCCCCTG |
| MI14 | 10 | 17785477 | TGGAAATCAATTTCCACCGGTGGTTTTTAACTAAC[C/T]GCCAATGAAAAGACCGATTT |
| 46 | | | CTACATACCCTTAGT |
| MI14 | 10 | 21828268 | CGTACTGGACGACCAAAACGCTCTGAGTATTCTAT[A/C]TTCAACAAGAAATACCACG |
| 47 | | | GAAAAACGCGGCCATA |
| MI14 | 10 | 22275001 | ACGTATCTACAACCGCTTGTACGCGGTCCAGTTGA[A/G]TGGAACAAATGATGCTATTC |
| 48 | | | TTCTTGAAGCTGCTA |
| MI14 | 10 | 24386964 | TAGCTATCGACCGGTCACTGACGTGCGAGACCAGC[C/T]GTTGCTTCGCCCCGTACCT |
| 49 | | | CAGTGGCTGTAAGTTA |
| MI14 | 10 | 24558753 | CTCAACAACACCCACACCACAAGAACTTGATCGTT[C/T]TTCCACAAATTCAAAGAGG |
| 50 | | | AGAGGGAAGAAGTGAA |
| MI14 | 10 | 26101648 | CTCCCCCAATTGCTACCTGTGGTTCACTCCTATCT[A/G]TGCTTGCTGCTACATGTTATT |
| 51 | | | TGAATTTCAAGTTG |
| MI14 | 10 | 26360071 | AATGCTAGTACACTTTGGACATCCTAGAGTGTGCT[A/G]GCACGGTGGACTGTAAGTC |
| 52 | | | GTGTGCTACTTCGGTG |
| MI14 | 10 | 27960831 | CAGACTCGCTAAAGGGACACGTATGCCGGACAAAC[A/G]GAGCGGTACGCATACTGG |
| 53 | | | GAGTACGATTATGCACG |
| MI14 | 10 | 29812819 | TAACAACACCAAAACGTGCGAAGACGCTACCATCT[A/G]CAACTCAGCGCATACACC |
| 54 | | | ACAATGAAAGACACATC |
| MI14 | 10 | 31334036 | CGTACTCCTGGTATGGCATATCTTCTCGCTCATTT[G/T]TCATATGGACCCCTGTAGTTA |
| 55 | | | GTCCATCGCTAACA |
| MI14 | 10 | 35046490 | AACTGAAGGTATCACAAAAATAAGTTGTATTTGCT[C/T]ATTGCCAAAAATCAAGTCAT |
| 56 | | | ATCAAAGCAGGTAGG |
| MI14 | 10 | 35156008 | CGTTTCGGTTGCGTCAACTTTCTAATAGCCTCGCC[G/T]GTGTGTTAAAACATTATTTTG |
| 57 | | | TCGCGACACAAGTT |
| MI14 | 10 | 35865983 | GTGGTCGCCGATGAAATATCTCCGGTCAGGCTCCA[A/G]CAAGGTTCGCGGAATCATG |
| 58 | | | ACACGGCCCGTAGTTA |
| MI14 | 10 | 38050344 | TTTGAAAACCATAATGTCAGAGAGGAAAATCACCA[A/G]CTGTGTGGTGGAACACAC |
| 59 | | | CCGCCCTAAATCCTAAG |
| MI14 | 10 | 43624157 | GTGACCGAAGTGCACCCAATTGATCTTCACCGTCA[C/T]GCATCCGTAGTTCGCCGTG |
| 60 | | | GACTGACCGAGCCAAC |
| MI14 | 10 | 45691464 | CATGTCACCTTCGTGGATATAAAAATGGATTAAGG[C/T]GGAAAGATCATTAACCGCCT |
| 61 | | | CTGATACCATATGAA |
| MI14 | 10 | 48353351 | CTTTACACCGAGGACCCTAGTCATCCAAATAACCT[G/T]TAAAGAGTCCTTAGCACTAT |
| 62 | | | TGCTCTGTGTCTCTA |
| MI14 | 10 | 53559947 | TGGGGCAAATCATGCGTAATATAAAGATAAGACAC[A/G]CAATTAACCTTATAAGGTAA |
| 63 | | | TTCTCCTCCTCCTTA |
| MI14 | 10 | 55197135 | CTTCAAGATGACTCCACTTTGTTTCTTTCGATGAA[G/T]TTCGTGGATAGTCTCATGAA |
| 64 | | | GAATGACAACCCCTT |
| MI14 | 10 | 59526327 | TGCGGCCTAACTCAGCTCGTCGCCATGCGGTATGG[A/G]ACCATCCCGATTGTCCGCA |
| 65 | | | AGACTGGAGGTACGTA |
| MI14 | 10 | 59821677 | TAGCCTAGCAAAATCTGTTCAAATGCAAAATCGTC[A/G]AGAACAAGCAATCGACACA |
| 66 | | | AAGAAATGAATAAAAT |
| MI14 | 10 | 63829892 | CAAACAAGGCTGTTACTAAGAAAATGGTGTTTACT[A/G]CATTAAGGGCTAATTTCGA |
| 67 | | | AACTCAAATCTCCTTG |
| MI14 | 10 | 66187229 | AAACATCCCTACAAAGACTACAAACATTGCAGGCA[C/T]TGTCCATGTTGTGCTGCTG |
| 68 | | | GATCGAAAAATCCAAC |
| MI14 | 10 | 66645618 | TAGGATTGGGTTAAAATTGGAACCGAGTTTAGTGC[C/T]ATGGATGAATGAGTGTTTCA |
| 69 | | | CATTGTTATCGCGTC |
| MI14 | 10 | 66652391 | GCTGCCATTCCCGTAACCAAGATTTGGGTATATAA[A/T]GGAGGCGTTTAAACGACCA |
| 70 | | | GTCTTAACCGCGACCG |
| MI14 | 10 | 67781960 | TTGGTCTATTTGTGCAAATAACTACATGTTTATAA[C/T]GTCCCGCACTATTGTGTATTG |
| 71 | | | TGGTCGACAATGCC |
| MI14 | 10 | 71744694 | TGGGATATCGGAGGAGAAATTTAGGGGGAACCGCT[A/G]AACACAGTCTAAGGCTGA |
| 72 | | | GCCAGCTGCAGCTTGCT |
| MI14 | 10 | 72720178 | CCACCTGATTCATCAAAAAATTTGACGATGGAACA[A/G]CATTAAGTTCAAATCACCT |
| 73 | | | TCAAGGCCACCGAAAG |
| MI14 | 10 | 73217544 | CGCCACATCACAATTCACAAACAAAAAACCATGCC[C/T]CCCCTAGATCACAGTATCA |
| 74 | | | GCAGAAAATCCGTCCA |
| MI14 | 10 | 73219081 | AGCGTGCGAAACATGCCACGCTCTAAGGAGGCCCT[A/G]TTCATCACCAGAGAGTCT |
| 75 | | | TCTTGGTTGAATCCCTG |
| MI14 | 10 | 75265737 | CTGCCCTCCTGCTGAAATCAACAGCTTATCTCCTA[C/G]GTGTGGATAGTTATTTCATG |
| 76 | | | AGTCTCTCGAATCAG |
| MI14 | 10 | 77204470 | GCTGAGCGTTGACTGTATATAGAATGCTATTTTAT[C/T]TTTACCTTTTCTAAGTACGTA |
| 77 | | | ATTGACTGACAGAG |
| MI14 | 10 | 79386470 | CTCTTAAATGAGTCGTCTGTATGATGCCATGTCAC[A/G]GAAATTTGCTTACGTGGACT |
| 78 | | | ATAATAAAAAGAAGG |
| MI14 | 10 | 82054207 | GCTGCAGCAGCTTGTGGCTGGAATCTTGACACAAC[G/T]GTAAGGAGCTACCTTTTTT |
| 79 | | | TTTCAGTTTGATACGC |
| MI14 | 10 | 82056607 | GTGCGCTGCTCGAGCGGTTCATAGCGTCGAGACCA[C/T]GTCAGCAATAACGCACAAT |
| 80 | | | TACATAGAATCTATTC |
| MI14 | 10 | 82632955 | TTCATCAATCTCGGCCCTTTGATCTGAAACTAGCG[G/T]CCATGATTAGATCTAGTTTAC |
| 81 | | | AGCAAACCGTTAAG |
| MI14 | 10 | 86365408 | TGCACTTGCCCAACAATGTGGTAGTCAAACTCGTG[C/T]GCGACATTGAGGTGGCTTC |
| 82 | | | CTAGATAGGATAATCT |
| MI14 | 10 | 87006666 | CCGAGCTGGAGAAACAGTGAGTCGGGGAGACGAGC[A/G]GCAGTGCAACCCCTGAG |
| 83 | | | GCGGTGAAGCAGCGAGAC |
| MI14 | 10 | 87181981 | AGCATCTAATGAAGATATGTTTGAACATTTTTATG[G/T]GGTGTCGTGCATCATTAGATA |
| 84 | | | CTCTGGATAAAAAT |
| MI14 | 10 | 87282119 | CTAAAATTTCTATATAGTTGAACAGGAAATGAAAC[A/G]CTATACACGATAGAAATCAA |
| 85 | | | TCACCACCCCCAACC |
| MI14 | 10 | 88282506 | GCGTGGATTAACATAATTATGACTATATATCCAAA[C/G]ATGACTATTTTCAGCATAGTC |
| 86 | | | ACGGACAAATTGTA |
| MI14 | 10 | 89540064 | GATGTTTGGTTGTTTGTTGGGTAACATATGTCCTC[A/G]TTATAGTGAGTCTAAACTTAG |
| 87 | | | ATGATTCACATGCT |
| MI14 | 10 | 91108119 | CTATATTTATGAATTGAAAGTTAGAAAAATCAACT[C/T]CTATGAGACATGTAGCAGTTT |
| 88 | | | CATAGATACAAGGC |
| MI14 | 10 | 92751666 | TTTAGTTTAATCGATGTAGATTAATCTTTCTAGCC[A/G]AAGTAGATTTGCTTATAATTA |
| 89 | | | TAATCTGACTACAT |
| MI14 | 10 | 93827070 | AGCTAGCACAGCTAGAGGTAGTTGACTCTGCTGTA[C/T]GTACGTACGTATGCTATGAT |
| 90 | | | GGAGGGCGACGACTT |
| MI14 | 10 | 95055628 | AGAGGCTGTTGACGAGAGGCCCCAAGAACATCCAC[C/T]GCTGGCCCAGGTTCCACG |
| 91 | | | CGAAGAGGTACAAGCCC |
| MI14 | 10 | 95056435 | ACGAGCCAGAAGAGGACGTCCACGTTGAGGAAGAA[G/T]AGGACGTTGGCCAGGAC |
| 92 | | | CAGAGGGTGCGCTGCGCA |
| MI14 | 10 | 96024147 | GAGGAGGGGCATGAGAGAGCTGAGGTAAGGCCCAC[C/T]GCCGCTTTCCTAGCACCA |
| 93 | | | GCGCTGGCCTGGCCTCC |
| MI14 | 10 | 97469203 | GACGAGCTACTATGGCGGATCAGGTGCCCGGTCGC[C/T]AGAGTTGAGCACGGTGTTG |
| 94 | | | TCATGGCCGGGAAGTC |
| MI14 | 10 | 10321685 | GAAAGAAGGATCTATTCACGAGGAGATGAGTTAAA[C/T]GTAAGGTACCGTTTGGTTC |
| 95 | | 6 | CAAAACATAGTTGGAC |
| MI14 | 10 | 10530112 | TAATTTTCTAGCACATGCAAATAAAAACAAAGGAT[A/G]CACATGTAAGGAATGGGCG |
| 96 | | 9 | CGTGGGGGTGGAGGCG |
| MI14 | 10 | 10811813 | AGCACGATAGCTGACAGCCACACATATATCTACGG[C/T]ACGATGGCCGACAATCACAT |
| 97 | | 3 | CAATCGGCGTCCATA |
| MI14 | 10 | 11010437 | TACAACTGGTGATCACATAGTTTTTGCAAAGCAAG[C/T]CTCAAGTGTTTCTTTTTTTC |
| 98 | | 0 | CTTTCTCATTCTTGG |
| MI14 | 10 | 11073564 | GATGGTGTGAGGGGACGGATGCGGTTGTTGGATCA[A/C]CATACGGTGCTGCCGGAG |
| 99 | | 9 | CTAAGGAAGAAGATGCT |
| MI15 | 10 | 11178715 | GTGGGTGGTTGGACTGGTTTGTCGAAGGGCTAGGC[A/G]AACCATGAAGGTTGTTTG |
| 00 | | 3 | ATGTCGCCGATTGATTC |
| MI15 | 10 | 11318842 | ATTATCTCACATCGAGAGCCCAAACTTGTATAAAT[A/C]TGTGTGTCTCGCTTTCGGTC |
| 01 | | 1 | ACGTGACTTACCCTA |
| MI15 | 10 | 11373234 | GCAGGACGTGTGGGTGTGGCTCGACCTCAGTGGAA[C/T]AACAAAGTTTTCCTCTGC |
| 02 | | 1 | TTACCTAAGCTAAGACC |
| MI15 | 10 | 11384698 | TGATCCTTGCATGAATCCTTTGCACGCATGGTGTG[G/T]CGACCGCTCCACCTCCTTTC |
| 03 | | 7 | CTCACTCGTTGTTTC |
| MI15 | 10 | 11595829 | TATAGCATTATTATTAGGATAGGATATATGTCATG[C/T]AATAAGTTAATGTACATGAAC |
| 04 | | 6 | TACCGTATTGCAGC |
| MI15 | 10 | 11645215 | TTCTTGTCGATACTTGGTCGTTTTTGCAGAAAACA[A/G]AAAACATTCATGTGTTTTTG |
| 05 | | 3 | TAATCCAACAGTTTA |
| MI15 | 10 | 11654638 | AGTGTTTACTTTGGCAAATTAACTTAATTTTGTTT[C/T]TTGCACTACTTTACAACTTTG |
| 06 | | 1 | TTTCTATTAACAAC |
| MI15 | 10 | 11885883 | CTGTATATTGCGCTTTGACTTTGATTAGATTTATA[G/T]GAAAAAAATTACATAAATATC |
| 07 | | 1 | TGCAGCTGTCATTC |
| MI15 | 10 | 11904668 | ATTTTCTTGAACAGAGATGTATGTAGATCATTTTT[A/C]TTGAACACGGAGGAGAGCTG |
| 08 | | 2 | CGTATTTTTTATATT |
| MI15 | 10 | 12085097 | TCGACGCGAAGTGCCTGCATGACTCGATCCAAAAC[A/C]GCAACTTTTTTTTTTTGTA |
| 09 | | 4 | GTGTTCCTGTCACCTC |
| MI15 | 10 | 12229468 | GAAGTTCTCTGTTCTCTCCCTCGTCCGGTCGTCCT[C/T]GTCCCTCACTCCCTCTCCCT |
| 10 | | 2 | AGTTGCCTACCCCCG |
| MI15 | 10 | 12312508 | GAGGATGTCGAGGAAGGAAAGACCTAGTCCATATC[A/G]ACGCGTCGACGTGGATGA |
| 11 | | 9 | CCGGAGGGAGAGAAGAG |
| MI15 | 10 | 12364545 | AGCCCATGACTTGTATCGAGCTAAATCCTTACTTC[A/G]GGAAAAAATAACTCATGAG |
| 12 | | 2 | ATCTATTGTTTCCGAA |
| MI15 | 10 | 12383726 | GAGCTGGGGATCGGATGTGGGGGTCGTGTACATAG[A/G]CGTCAAGTCGTCAACACTC |
| 13 | | 3 | TCCAGCACTTTGATGC |
| MI15 | 10 | 12510733 | ATAAACCTAACATGGCTAGTGACTAAATTTCATTA[A/G]TTGAACTGAGATTGAAAAGC |
| 14 | | 6 | TCTGTCGCCTAAGGT |
| MI15 | 10 | 13009775 | TTGTTTAGTGTTTCCATGTACACTGTATTTTTGAC[A/G]TGTTCACGTTGGGTGTGATCC |
| 15 | | 8 | GATTTCTTGTTTTT |
| MI15 | 10 | 13241786 | AGGAAAATCATTGACATTTTAAACTAACAGCACAA[G/T]TAATCTCCTATGTTTCGCAT |
| 16 | | 4 | ATGCCTACAAAATAG |
| MI15 | 10 | 13333379 | AGAATAGATATAAACCACAGCGTATTGAACACCGA[A/G]TGTTGCCTGCACACCCAAT |
| 17 | | 6 | AGTACTCACTTGCAAA |
| MI15 | 10 | 13381301 | GCTCGGCTCGTTCAGTGGCGCCGATGCAAAATCAC[C/T]AGGGCCGTAGGGTACTAGC |
| 18 | | 2 | AGATTCCGCGACACCC |
| MI15 | 10 | 13408223 | GCGGCGTCATACCCGTAGCTCCAAAACTTGGCTAC[A/C]TGACCTGAAGCATTTCTATC |
| 19 | | 8 | ACGATTGTTAAACGT |
| MI15 | 10 | 13609986 | AGTGATGGTTCAGCAACTCCGACGGCACGTGTGCC[A/C]GTGTATGTAAACGCGTGCG |
| 20 | | 6 | TGATAGTACATTTTAG |
| MI15 | 10 | 13690740 | TGTGTGATCGATCCATAGGCTTTGCTGTTGCTCTG[A/G]TCCACTGATCTCTCTTCCTGT |
| 21 | | 8 | GGTGTCGCCTTTTG |
| MI15 | 10 | 13696502 | AAGGCCTTAGCTAATTTATTTTTAGCTAGCTAACA[A/G]TCAACTATAGCTTACGTGAG |
| 22 | | 4 | CTCTATTTAGGTGCA |
| MI15 | 10 | 13785408 | GGTCGTGAAGAACTCGGGCCAGCCACAAGGTACTG[G/T]GATATCTATTTGCTTTTCC |
| 23 | | 3 | CGCTTATTATTTTCTG |
| MI15 | 10 | 13837309 | AGGTGAGGTGTGCGACTATCTCTCTCCTCCTCCAC[C/T]GGCCGAGGTACTTCTGGCT |
| 24 | | 2 | GACCGACTAAGGGTGT |
| MI15 | 10 | 13848139 | ACTCCCAACAGTAATGTCGTCTCTGGGATCCTGAC[C/T]GAGACTTTTCACTTTGAGCT |
| 25 | | 2 | GGCACCGAATCAGTA |
| MI15 | 10 | 13905644 | GGGAGACCCATACTCGCCTATCTGCGCCTCCTCCT[G/T]CTCTGCCTCTTGCCCTTATT |
| 26 | | 7 | GCTCTTTTGCAGTAG |
| MI15 | 10 | 14080114 | GGACATATCCTTGTTGTCTGGATTGATGTCAATTA[C/T]AACAGATTCATCGACATACG |
| 27 | | 3 | GGGTCACACGTGCAC |
| MI15 | 10 | 14204600 | ACGGATAAAAGTAATAGAAAAAAGCATAGAATTTT[A/G]TTACACAGATTCGATTATAG |
| 28 | | 2 | GTTGCTGGAACATGA |
| MI15 | 10 | 14313607 | CCGTTCACTTCCTTTTCTCTCAAGTCGAGGGACAT[G/T]GCACCATCCAGCCTCCTAAA |
| 29 | | 1 | CTGTATGCCATTTCT |
| MI15 | 10 | 14353853 | TTTCTAGTTTAATTTAGTATGGATCAAAGTGTGTA[G/T]CAGGTCTCTATTGATTGTACT |
| 30 | | 9 | ACCAAATAAATTAA |
| MI15 | 10 | 14555293 | GGTCTACTAGAGGATCGGTTCGTGTTCATGGCATG[G/T]GTATTAATGTAAACGTTATC |
| 31 | | 3 | GGTAACCGCCAGAAT |
| MI15 | 10 | 14572929 | TAAGTGATATATCATGAGGCGAAACAAAGTAATCT[A/G]TGTTTCCAAAAGATTTCTCT |
| 32 | | 9 | GACAAAAAATTCTAG |
| MI15 | 10 | 14602036 | GCATTCTGTCGACCCAGGCACACGGGTCCAAAATC[C/T]GAGAGGCTAGTGGGTCCA |
| 33 | | 6 | GCTAGCTACAGCTGCTG |
| MI15 | 10 | 14697472 | CTGGTTGTGATATTTTTCATGGCTTGTGAATTGCT[C/T]GGGAAGAGTTATGTGAAACT |
| 34 | | 4 | TATTAGAGTACGGAT |
| MI15 | 10 | 14805072 | AAGTAGTGCAACAGATAACGCCGTTGCATTTCCTC[C/T]AGATTCCTTACCTGTGGCCG |
| 35 | | 3 | TCAGCAAGTGTCCGT |
| MI15 | 10 | 14924545 | CCATACAAAATAAGCATATATATAGTTATAGTCGG[A/G]GAGTTTATAGATTCCACAATG |
| 36 | | 3 | CCATGCCTTGGGAC |

[0007] A selection process of the 1,536 SNP loci in the present disclosure is as follows:

[0008] (I) Evaluation and screening of SNP markers in Maize6H-60K array.

[0009] (1) Genome-wide resequencing is conducted on 400 broadly representative inbred lines inside and outside of China, with a sequencing depth of 10×. The sequences are aligned to a maize reference gene sequence using bwa software, and a total of 27,648,399 SNP loci are mined.

[0010] (2) Biological information analysis methods are used to analyze whether the loci are dimorphic and single-copy and have polymorphism, and the number of SNP loci is 183,538; high-quality loci (85,231 SNPs) in the known arrays of maize are integrated together; a set of candidate loci is formed.

[0011] (3) The above loci are submitted to Affymetrix and Illumina, two mainstream technology platforms, for locus scoring and probe design; evaluation scores are 0.6 and above, and inclusion is defined as the evaluation results of flanking probes designed being either recommended or neutral.

[0012] (4) The loci that meet the design requirements are further evaluated based on the sequencing data and further analyzed to obtain a set of candidate loci (88,619 SNPs) based on parameters such as polymorphism, heterozygosity, and conservation of flanking 60 bp sequences.

[0013] (5) The above-mentioned loci are formed into a locus set according to the principle of substantially uniform physical and genetic distribution; locus evaluation and probe design are performed again by submitting to Affymetrix and Illumina again to form a high-density 60K array (Maize6H-60K).

[0014] (II) Evaluation and screening of 1,536 high-quality and efficient SNP markers.

[0015] (1) Based on the 60K array, using 200 inbred lines and 200 hybrids, loci are verified according to the test results such as data acquisition rate, genotyping effect, and characteristics of triplet. The data acquisition rate is more than 99%; evaluation of triplet samples conforms to the genetic law; the loci can be automatically typed, and evaluation type is poly high resolution (PHR) in each test; the number of obtained markers is 15,031.

[0016] (2) Based on the locus polymorphism, MAF value is greater than or equal to 0.2, and PIC value is greater than or equal to 0.2, and the number of obtained markers is 14,630.

[0017] (3) According to the fact that the loci are distributed within a gene and adjacent markers are not closely linked, 9,343 markers are obtained.

[0018] (4) Still further, in accordance with a uniform distribution, 2-4 markers are screened each 2,000 Kbp, and finally, 1,536 SNP markers are determined (see FIG. 2).

[0019] These 1,536 SNP markers can be used in Affymetrix or Illumina's related array technology platforms for production applications (FIG. 1 shows the genotyping effect of a randomly selected locus on the Affymetrix array technology platform).

[0020] A probe for detecting the SNP marker described in the present disclosure belongs to the protection scope of the present disclosure.

[0021] The present disclosure further provides use of the above probe in the preparation of a genome-wide maize SNP array.

[0022] The specific implementation of the SNP array obtained by the present disclosure is performed by the following steps:

[0023] (1) Probe and array preparation. Probes for 1,536 SNP loci are synthesized and arrays are produced at Affymetrix.

[0024] (2) Sample DNA extraction. Desired samples are collected and sample genomic DNAs are extracted according to the designed maize molecular identification, molecular breeding or other biological research experiments; specific concentrations of sample genomic DNA solutions are prepared according to the requirements of customized SNP arrays and stored appropriately.

[0025] (3) Array detection and genotyping of SNP loci. According to the requirements of customized arrays, processed sample genomic DNAs are hybridized with probes on the SNP arrays on the corresponding genotyping instrument to obtain hybridization signal data, i.e., raw array detection data.

[0026] (4) Genotyping analysis. Using software, quality control is conducted on the raw array detection data, the data with high quality of the hybridization signal are selected for analysis and converted into genotyping data of SNP loci; combining the data with the corresponding maize molecular identification, molecular breeding, or other biological research experiments, the corresponding data analysis methods are selected to obtain the corresponding results.

[0027] Further, the present disclosure provides a genome-wide maize SNP array, which contains the probe for detecting the above SNP marker according to the present disclosure.

[0028] The present disclosure provides use of the SNP marker, or the probe, or the SNP array in the construction of a maize DNA fingerprint database.

[0029] The present disclosure provides use of the SNP marker, or the probe, or the SNP array in the identification of genuineness of maize cultivars or the identification of maize cultivars.

[0030] The specific determination standards for the testing of genuineness of maize cultivars using the present disclosure are as follows:

[0031] The genotyping data of test and control samples at 1,536 SNP loci are acquired, and a comparison is made of the data between the samples to obtain the percentage of discrepant loci. The calculation method of the percentage of discrepant loci is D=(the number of discrepant loci n/the number of comparable loci N)×100% (the number of comparable loci must be greater than or equal to 1,460, that is, the percentage of missing data is <5%, and the maximum value of N is 1,536).

[0032] (1) The percentage of discrepant loci between test and control cultivars is ≥5%, and it is concluded that a significant difference is detected;

[0033] (2) The percentage of discrepant loci between test and control cultivars is <5%, and it is concluded that no significant difference is detected.

[0034] The present disclosure provides use of the SNP marker, or the probe, or the SNP array in maize cluster analysis or maize phylogenetic analysis.

[0035] The present disclosure provides use of the SNP marker, or the probe, or the SNP array in the analysis of maize germplasm resources.

[0036] The present disclosure provides use of the SNP marker, or the probe, or the SNP array in the construction of a maize linkage map and gene mapping.

[0037] The present disclosure provides use of the SNP marker, or the probe, or the SNP array in the background selection of molecular breeding materials of maize.

[0038] In the present disclosure, SNP loci are mined based on high-quality sequencing data of representative maize samples inside and outside of China, and biological information analysis methods are used to assess whether the loci have polymorphism and whether the loci are single copies, so as to form a set of excellent genome-wide maize SNP loci. Candidate loci are strictly tested and evaluated on the two mainstream array technology platforms; combined with the principles of polymorphism and uniform distribution, a high-quality and efficient combination of 1,536 SNP markers is formed. Based on the combination of 1,536 SNP markers, the present disclosure provides a genome-wide SNP array suitable for molecular detection and molecular breeding of maize, containing the combination of 1,536 SNP markers; this marker combination has undergone a plurality of rounds of verification and has advantages of high quality, high discriminability, high compatibility and uniform distribution; the array can be used in DNA fingerprint construction, cultivar identification and confirmation of maize cultivars, research on germplasm resources at a genomic level, molecular marker-assisted selective breeding, and other basic research, with good application prospects and objective market value.

### BRIEF DESCRIPTION OF THE DRAWINGS

[0039] FIG. 1 illustrates a genotyping effect of randomly selecting a locus among 1,536 SNP markers disclosed in the present disclosure. In the figure, a left genotypes cluster is AA, a middle genotype cluster is AB, and a right genotype cluster is BB.

[0040] FIG. 2 illustrates the distribution of 1,536 SNP markers disclosed in the present disclosure on the 10 pairs of maize chromosomes, which are well distributed uniformly on the whole genome.

[0041] FIG. 3 illustrates a cluster analysis of 200 maize germplasm resources based on 1,536 SNP markers.

### DETAILED DESCRIPTION

[0042] The following examples facilitate a better understanding of the present disclosure. It should be understood that the following examples are for illustrative purposes only and are not intended to limit the scope of the present disclosure. Unless otherwise specified, the experimental methods in the following examples are conventional. Unless otherwise specified, experimental reagents and materials used in the following examples are all purchased from conventional biochemical reagent stores.

### Example 1 Obtaining of Genome-Wide Maize SNP Loci and Synthesis of Genome-Wide Array

[0043] (I) Evaluation and Screening of SNP Markers in Maize6H-60K Array

[0044] (1) Genome-wide resequencing was conducted on 400 broadly representative inbred lines inside and outside of China, with a sequencing depth of 10×. The sequences were aligned to a maize reference gene sequence using bwa software, and a total of 27,648,399 SNP loci were mined.

[0045] (2) Biological information analysis methods were used to analyze whether the loci were dimorphic and single-copy and had polymorphism, and the number of SNP loci was 183,538; high-quality loci (85,231 SNPs) in the known arrays of maize were integrated together; a set of candidate loci was formed.

[0046] (3) The above loci were submitted to Affymetrix and Illumina, two mainstream technology platforms, for locus scoring and probe design; evaluation scores were 0.6 and above, and inclusion was defined as the evaluation results of flanking probes designed being either recommended or neutral.

[0047] (4) The loci that met the design requirements were further evaluated based on the sequencing data and further analyzed to obtain a set of candidate loci (88,619 SNPs) based on parameters such as polymorphism, heterozygosity, and conservation of flanking 60 bp sequences.

[0048] (5) The above-mentioned loci were formed into a locus set according to the principle of substantially uniform physical and genetic distribution; locus evaluation and probe design were performed again by submitting to Affymetrix and Illumina again to form a high-density 60K array (Maize6H-60K), which was commercially available.

[0049] (II) Evaluation and Screening of 1,536 High-Quality and Efficient SNP Markers

[0050] (1) Based on the 60K array, using 200 inbred lines and 200 hybrids, loci were verified according to the test results such as data acquisition rate, genotyping effect, and characteristics of triplet. The data acquisition rate was more than 99%; evaluation of triplet samples conformed to the genetic law; the loci could be automatically typed, and evaluation type was poly high resolution (PHR) in each test; the number of obtained markers was 15,031.

[0051] (2) Based on the locus polymorphism, MAF value was ≥0.2, and PIC value was ≥0.2, and the number of obtained markers was 14,630.

[0052] (3) According to the fact that the loci were distributed within a gene and adjacent markers were not closely linked, 9,343 markers were obtained.

[0053] (4) Still further, in accordance with a uniform distribution, 2-4 markers were screened each 2,000 Kbp, and finally, 1,536 SNP markers were determined, as shown in Table 1. FIG. 2 shows the distribution of the 1,536 loci on the maize chromosome.

[0054] These 1,536 SNP markers can be synthesized and applied using Affymetrix or Illumina's related array technology platforms. FIG. 1 illustrates an experimental effect of randomly selecting a locus on the Affymetrix array technology platform.

### Example 2 Construction of a Standard Maize DNA Fingerprint Database Using the Genome-Wide SNP Array of the Present Disclosure

[0055] 1. DNA Extraction and Quality Identification

[0056] Samples of known maize hybrids were selected, genomic DNAs were extracted separately using conventional cetyltrimethyl ammonium bromide (CTAB) method, and RNAs were removed; the quality of the extracted DNAs was separately detected by agarose gel electrophoresis and ultraviolet (UV) spectrophotometer. That is, agarose gel electrophoresis showed that DNA band was single and there was no obvious diffusion; the UV spectrophotometer detected A260/280 between 1.8 and 2.0 and A260/230 between 1.8 and 2.0; Qubit4 was used to quantify genomic DNAs, and the genomic DNAs of all maize samples were diluted to 20 ng/μl.

[0057] 2. Genotyping Experiment Using the Genome-Wide SNP Array

[0058] The genome-wide SNP array prepared in Example 1 was used to detect the genomic DNA of each maize sample obtained in step 1. Specifically, operations were in accordance with the Affymetrix array detection standard process; array hybridization, array scanning, raw data acquisition, etc. were performed on the GeneTitan system to obtain the raw data for each sample.

[0059] 3. Acquisition of SNP-DNA Fingerprint Data of Maize Samples

[0060] The raw data were imported into Axiom Analysis Suite software, and the fingerprint data of 1,536 SNP markers for each maize sample were analyzed; finally the DNA fingerprint data of the SNP markers of the maize samples were imported into a database management system to establish a known maize hybrid SNP-DNA fingerprint database.

[0061] Example 3 Identification of Genuineness of Maize Cultivars Using the Genome-Wide SNP Array of the Present Disclosure

[0062] 1. To Determine the Criteria for Determining the Results of the Genuineness of Maize Cultivars Using the SNP Array Prepared in Example 1

[0063] Agricultural industry standard (NY/T1432-2014), the Protocol for the Identification of Maize Varieties—SSR Marker Method, is a DNA fingerprint identification method for maize cultivars based on SSR markers; this standard deems cultivars with 40 SSR loci with ≥2 discrepant loci as different cultivars, which are calculated as 5% discrepancy according to the locus ratio.

[0064] An analysis was made of the pairwise comparison of the percentage of discrepant loci of 400 maize cultivars, and results showed that the percentage of discrepant loci was between 0.2% and 75%, among which maize cultivars with a percentage of discrepant loci of less than 5%, 5%-10%, and more than 10% accounted for 0.03%, 0.025%, and 99.94%, respectively. According to the above results, the 5% percentage of discrepant loci can be used as a determination threshold for the identification of genuineness of maize cultivars.

[0065] The specific determination criteria for the identification of genuineness of maize cultivars using the present disclosure are as follows: genotyping data of test and control samples at 1,536 SNP loci are acquired, and a comparison is made of the data between the samples to obtain the percentage of discrepant loci. The calculation method of the percentage of discrepant loci is D=(the number of discrepant loci n/the number of comparable loci N)×100% (the number of comparable loci must be greater than or equal to 1,460, that is, the percentage of missing data is <5%, and the maximum value of N is 1,536).

[0066] (1) The percentage of discrepant loci between test and control cultivars is >5%, and it is concluded that a significant difference is detected;

[0067] (2) The percentage of discrepant loci between test and control cultivars is <5%, and it is concluded that no significant difference is detected.

[0068] 2. To Identify Whether a Maize Sample to be Tested is a Known Control Maize Cultivar

[0069] The following will describe in detail how to use the SNP array prepared in Example 1 to identify whether a maize sample to be tested (code A) is a known control maize cultivar Zea mays ‘Zhengdan 958’ (code B).

[0070] DNA extraction and quality identification: Genomic DNAs were extracted from a maize sample to be tested (code A) and a control maize cultivar Z. mays ‘Zhengdan 958’ (code B) for DNA quality identification, array detection and acquisition of genotyping fingerprint data of 1,536 marker loci. The specific methods were the same as those in Example 2.

[0071] An alignment was made of the fingerprint data for 1,536 SNP genotypes between sample A and sample B. According to the results, the number of comparable loci between sample A (the maize sample to be tested) and sample B as the control maize sample (the known maize cultivar Z. mays ‘Zhengdan 958’) was 1,636, the number of difference loci was 940, and the percentage of discrepant loci was 61.2%. According to the 5% determination criteria, the maize sample A to be tested was not identified as Z. mays ‘Zhengdan 958’.

### Example 4 Identification of Specificity of Maize Samples Using the Genome-Wide SNP Array of the Present Disclosure

[0072] The following will describe in detail how to use the SNP array prepared in Example 1 to identify whether a maize sample to be tested (code C) is cultivar-specific.

[0073] DNA extraction and quality identification: Genomic DNA was extracted from a maize sample to be tested (code C) for DNA quality identification, array detection and acquisition of genotyping fingerprint data of 1,536 markers. The specific methods were the same as those in Example 2.

[0074] The fingerprint data for 1,536 SNP genotypes of sample C was imported into the known maize hybrid SNP-DNA fingerprint database constructed in Example 2, and the fingerprint of the sample C was aligned with the fingerprints of known cultivars one by one. If the percentage of discrepant loci between the sample C and known maize cultivars reaches 5% and above, the maize sample C will be specific; if the percentage of discrepant loci between the sample C and known maize cultivars is found to be less than 5%, the maize sample C will not be specific.

### Example 5 Analysis and Evaluation of Maize Germplasm Resources Using the Genome-Wide SNP Array of the Present Disclosure

[0075] In the evaluation and screening process of 1,536 SNP markers provided by the present disclosure, various types of representative germplasm resource materials are selected. Therefore, a good discrimination effect can be obtained when evaluating and analyzing maize germplasm resources samples, such as the use in heterotic grouping. The following is the heterotic grouping of 200 germplasm resources samples using the SNP array prepared in Example 1.

[0076] For 200 maize samples, specific methods for DNA extraction and quality identification, array detection and acquisition of genotyping fingerprint data of 1,536 SNP markers were the same as those in Example 2. Based on the acquired genotyping data of 1,536 markers in 200 samples, using Power-Marker ver.3.25 software, Rogers (1972) genetic distance calculation method was used to analyze and establish an NJ cluster-joining tree. Thus, 200 samples were grouped into different groups, and a total of nine groups were formed (see FIG. 3).

[0077] The present disclosure has been described in detail above with reference to general descriptions and specific examples, but it will be apparent to those skilled in the art that some modifications or improvements can be made based on the present disclosure. Therefore, all these modifications or improvements made without departing from the spirit of the present disclosure fall within the scope of the present disclosure.

The application's sequence listing, which the Patent Office published only in electronic form, follows.

SEQUENCE LISTING (1536 sequences)

SEQ ID NO: 1 - DNA, 71 bp, artificial sequence
  Synthesized
  misc_feature (36)..(36): n=C/T
cagccataaaacgagatgctcgacatcctgatgctngaatggtgattattaaaaaacaaggaaatcaaaga

SEQ ID NO: 2 - DNA, 71 bp, artificial sequence
  Synthesized
  misc_feature (36)..(36): n=A/C
acattccgatcgacgctgagaagttgcaaccccagnaagggtcctcgacccatgtctcgcaggtacaacca

SEQ ID NO: 3 - DNA, 71 bp, artificial sequence
  Synthesized
  misc_feature (36)..(36): n=C/T
cgaacggttggacacactgtgctgaaatggcgtganggatacagtgacacattacttgcacatacatactg

SEQ ID NO: 4 - DNA, 71 bp, artificial sequence
  Synthesized
  misc_feature (36)..(36): n=C/T
ccgatacaaagacgaataggtacagtaatcacctcntcttttcctctcttgagacgtggcatatatttttt

SEQ ID NO: 5 - DNA, 71 bp, artificial sequence
  Synthesized
  misc_feature (36)..(36): n=C/T
acatttccagcagtggcggccaaggctcggatgttntcctgtgtgtcaaaaaaacccatttcttggagctg

SEQ ID NO: 6 - DNA, 71 bp, artificial sequence
  Synthesized
  misc_feature (36)..(36): n=G/T
cgaaattgtttgtgaatctagtctgtttacttccangcttacgtgcggatgtggccaggagcgttggccag

SEQ ID NO: 7 - DNA, 71 bp, artificial sequence
  Synthesized
  misc_feature (36)..(36): n=A/G
caaaacggggtggggttttcattttattacacgacnaacagaatcagcaaacgacggaatggactcgtagg

SEQ ID NO: 8 - DNA, 71 bp, artificial sequence
  Synthesized
  misc_feature (36)..(36): n=A/G
cttgcctggtacaggaactgtgcgtagttcctgagnaagaggccgttgcaggggtcctcctcgatcatctt

SEQ ID NO: 9 - DNA, 71 bp, artificial sequence
  Synthesized
  misc_feature (36)..(36): n=A/G
ggagacttcgatcatggcttaagatgaaccatggcnacatgcttaacacatgcaagtcaaacgaaaagtag

SEQ ID NO: 10 - DNA, 71 bp, artificial sequence
  Synthesized
  misc_feature (36)..(36): n=A/G
tgagaccctgggagtagtctaggagagagaaggtcntcatctgcatgcatggcagtatggcacgcagtgtg

SEQ ID NO: 11 - DNA, 71 bp, artificial sequence
  Synthesized
  misc_feature (36)..(36): n=A/G
tatatttagtcagtcagcagattaggaataaaaganacaacagataagtttttatatttagtcagtctgtt

SEQ ID NO: 12 - DNA, 71 bp, artificial sequence
  Synthesized
  misc_feature (36)..(36): n=A/C
cgactaaaaaacaacacatggcagaggcagaccacnatttgaacttccctccaaaagtccagactcccaag

SEQ ID NO: 13 - DNA, 71 bp, artificial sequence
  Synthesized
  misc_feature (36)..(36): n=A/C
ttgcgttgttgctcatgtatcgcctcaagaggggangcttaaagatgggtggaagccgatacaccgtattc

SEQ ID NO: 14 - DNA, 71 bp, artificial sequence
  Synthesized
  misc_feature (36)..(36): n=A/C
ctcagcccctccactcgcatcccgtgtccatcggcnggagatcaaactccacacggcgctctgcttccatt

SEQ ID NO: 15 - DNA, 71 bp, artificial sequence
  Synthesized
  misc_feature (36)..(36): n=A/G
tggagagaatccatgtacctgaaaagctgccgaaantatagcaagagcagggcaaaatgttgaaaattttt

SEQ ID NO: 16 - DNA, 71 bp, artificial sequence
  Synthesized
  misc_feature (36)..(36): n=A/G
agccatgcatgattggtactcgctccattgagctcnacaaaatcatcgaagattagcatctccttgaacca

SEQ ID NO: 17 - DNA, 71 bp, artificial sequence
  Synthesized
  misc_feature (36)..(36): n=C/T
agtttaattaaggaatcaaaagcataaatcacacanataaagaattgaaatttaaaatggacgcttattaa

SEQ ID NO: 18 - DNA, 71 bp, artificial sequence
  Synthesized
  misc_feature (36)..(36): n=G/T
agactgctttctttcaatggctcctgactgccttcnttcgatgcctcctgactgccttctttcgatgctgg

SEQ ID NO: 19 - DNA, 71 bp, artificial sequence
  Synthesized
  misc_feature (36)..(36): n=C/T
tcacctgctatgtttttctaggttgtgccattagancaggcacacaaaatatacaacgccttgaaagagaa

SEQ ID NO: 20 - DNA, 71 bp, artificial sequence
  Synthesized
  misc_feature (36)..(36): n=A/G
agttaaacggtttatgaaaataagttgacggccaanacatgcagccaatttaaaaataaatgtaggcacca

SEQ ID NO: 21 - DNA, 71 bp, artificial sequence
  Synthesized
  misc_feature (36)..(36): n=C/G
gcagaaagaaaaatcggaaagaaagccggccccggncggatgcggtttctcgagaatcttctggcaacgac

SEQ ID NO: 22 - DNA, 71 bp, artificial sequence
  Synthesized
  misc_feature (36)..(36): n=A/G
acctgtagtgttagcatgagtcatgataccatgttngacatttgaaggaaagttctaatagataagttcgc

SEQ ID NO: 23 - DNA, 71 bp, artificial sequence
  Synthesized
  misc_feature (36)..(36): n=C/T
gaccagtgatcaactgcatcgcgacggcccatgcgngtcatcaagatgcggcccacacgcacgcgtaccta

SEQ ID NO: 24 - DNA, 71 bp, artificial sequence
  Synthesized
  misc_feature (36)..(36): n=C/T
tcttcccaaggggatgggaatgaggagtcattcacngaataagaattctccgctgccatctccagtgggga

SEQ ID NO: 25 - DNA, 71 bp, artificial sequence
  Synthesized
  misc_feature (36)..(36): n=C/G
gggagcagatcccacctttcattaaaataccatcanggcatctgagtcagatgcctgacgatggacaaaag

SEQ ID NO: 26 - DNA, 71 bp, artificial sequence
  Synthesized
  misc_feature (36)..(36): n=G/T
taacagaaaccgaacaaaaaagggggaatcctaacnaactgcgccctgatcgggggcgcaatcctatatgg

SEQ ID NO: 27 - DNA, 71 bp, artificial sequence
  Synthesized
  misc_feature (36)..(36): n=C/T
taataatacaataagtgtgtgcacacgaataaatgncatcattgtcaagtgttaatttgaatgacaaagat

SEQ ID NO: 28 - DNA, 71 bp, artificial sequence
  Synthesized
  misc_feature (36)..(36): n=A/C
aattaatggcgcaaggttcctgcttgtgcaatttgntcatttcatgagggcatgagtagtcatcaccatgc

SEQ ID NO: 29 - DNA, 71 bp, artificial sequence
  Synthesized
  misc_feature (36)..(36): n=C/T
cgtggtcactggccactgcacattgcccaggatttnctgtggatggccgggcccgggacagcagcatggtg

SEQ ID NO: 30 - DNA, 71 bp, artificial sequence
  Synthesized
  misc_feature (36)..(36): n=G/T
gttcgtctctacgtgactctctctccatatatatantctcttaattacacttatggtttagaggctctagg

SEQ ID NO: 31 - DNA, 71 bp, artificial sequence
  Synthesized
  misc_feature (36)..(36): n=A/G
agggagtaatccaatgctactggtgtttgtgcaccnacatgtgaacctttttgtgtctaactgatgctgcc

SEQ ID NO: 32 - DNA, 71 bp, artificial sequence
  Synthesized
  misc_feature (36)..(36): n=C/T
cctttcatcacgctggcgggtccgggattgctgttnggagtacgcgctcctttcaaaatgtttggtgaatt

SEQ ID NO: 33 - DNA, 71 bp, artificial sequence
  Synthesized
  misc_feature (36)..(36): n=C/G
ccttctgagctctgtggtgctcttataggttttttnagaggtagctgtggggtcctttaatttaggtccta

SEQ ID NO: 34 - DNA, 71 bp, artificial sequence
  Synthesized
  misc_feature (36)..(36): n=A/G
tcacgcggtgtccgattgataccatcgtcgttgctncaggtacggctcgtgatagacccggttataacgaa

SEQ ID NO: 35 - DNA, 71 bp, artificial sequence
  Synthesized
  misc_feature (36)..(36): n=A/G
gtatatacacatcggcacttcctaatcttcgcttcngaatgccaatttggctcctttttcccttaatcata

SEQ ID NO: 36 - DNA, 71 bp, artificial sequence
  Synthesized
  misc_feature (36)..(36): n=A/G
agcagaggattatagctttcattggaaggtatgcantggtggcataacttttatggcgatcattaattctg

SEQ ID NO: 37 - DNA, 71 bp, artificial sequence
  Synthesized
  misc_feature (36)..(36): n=A/G
tcgccatggccggaaattgtttccggggggtttctncctttctggcttggatagaggaaagagatagagcg

SEQ ID NO: 38 - DNA, 71 bp, artificial sequence
  Synthesized
  misc_feature (36)..(36): n=C/T
aggactaaatgtgatgctatcacaccacaaaagaangtggcaccgagcattacgatcctgaggtcgggact

SEQ ID NO: 39 - DNA, 71 bp, artificial sequence
  Synthesized
  misc_feature (36)..(36): n=C/T
aaatcattctaggtgaggtatggcttcaaattcccngtcctcctcttatttaaaaaaaaggacatgtaatt

SEQ ID NO: 40 - DNA, 71 bp, artificial sequence
  Synthesized
  misc_feature (36)..(36): n=A/G
tgcctgaagacacatatcaggtggcgtgttctctanggcagaagactaccgacctagccgaactaaaggaa

SEQ ID NO: 41 - DNA, 71 bp, artificial sequence
  Synthesized
  misc_feature (36)..(36): n=C/T
catactggaccttcgatttaccaatctgtccattangatcagcgattaaaccgtaaggtttaggaaatttc

SEQ ID NO: 42 - DNA, 71 bp, artificial sequence
  Synthesized
  misc_feature (36)..(36): n=A/G
ttttgttcctgtacatgtgaaggtcaattggtctgnggtttttaaaatacagtaattggtttacgggtttt

SEQ ID NO: 43 - DNA, 71 bp, artificial sequence
  Synthesized
  misc_feature (36)..(36): n=G/T
ttttaactgcattgcggagtcagtcaggtgggctgncatctgcgcaaaaggtgaaaccataggcccggtgc

SEQ ID NO: 44 - DNA, 71 bp, artificial sequence
  Synthesized
  misc_feature (36)..(36): n=C/T
tattgtggtaattaagaaaaaaacagggctgcgtcnaagcagttgtacatagaagattaatatccgatgat

SEQ ID NO: 45 - DNA, 71 bp, artificial sequence
  Synthesized
  misc_feature (36)..(36): n=C/T
ccgggtgtgacatctagggcctttgacaccacacantcaataaggttattcgtaaaagttaattacttatg

SEQ ID NO: 46 - DNA, 71 bp, artificial sequence
  Synthesized
  misc_feature (36)..(36): n=G/T
ggccctacctgccagccacacccgatcgtcctcctngcgtacctaacgcatgcctaatcgcgggagtaaac

SEQ ID NO: 47 - DNA, 71 bp, artificial sequence
  Synthesized
  misc_feature (36)..(36): n=A/G
ctggcaatgtgttctcatacgtaatctggaagtacngtgtcttggtatttccgtctgcttccgagccaacg

SEQ ID NO: 48 - DNA, 71 bp, artificial sequence
  Synthesized
  misc_feature (36)..(36): n=G/T
ttgggtgtacatgtgtacacccatgcccctttactngttccgcccccgtaaagactaagctgaaaccatgg

SEQ ID NO: 49 - DNA, 71 bp, artificial sequence
  Synthesized
  misc_feature (36)..(36): n=A/G
ccgcctctccgcgtccgctgagtcactgcctcctgngcccggacccacacgcccctcgtcaatcaacatca

SEQ ID NO: 50 - DNA, 71 bp, artificial sequence
  Synthesized
  misc_feature (36)..(36): n=C/T
ttacagaacttatgctctccttctcagagcttgtgnaaaatgctcagacctctatgcttccattgaatcca

SEQ ID NO: 51 - DNA, 71 bp, artificial sequence
  Synthesized
  misc_feature (36)..(36): n=A/G
catgtgaccatagttctaagttgtacctacgcccangtgaatatggcacaggattcaagatctgcccttgt

SEQ ID NO: 52 - DNA, 71 bp, artificial sequence
  Synthesized
  misc_feature (36)..(36): n=C/T
aacatgatgatggggaaattatctgtgacatacccntataaacttttaacatgatgggcaaattatctgtg

SEQ ID NO: 53 - DNA, 71 bp, artificial sequence
  Synthesized
  misc_feature (36)..(36): n=A/G
tttctcttggcatccatccttctatttttctcctcnattctaattccactgtcctttttgagcctctcgct

SEQ ID NO: 54 - DNA, 71 bp, artificial sequence
  Synthesized
  misc_feature (36)..(36): n=A/G
cccgagagggactccattgggagcaaggatcttggngttgcttcgggatcagcaggccaaccaaaatactt

SEQ ID NO: 55 - DNA, 71 bp, artificial sequence
  Synthesized
  misc_feature (36)..(36): n=A/G
atatatataaatgactaatcgatcttccttaaaagncacacgcatggttttaaatgatgacaggctagctt

SEQ ID NO: 56 - DNA, 71 bp, artificial sequence
  Synthesized
  misc_feature (36)..(36): n=A/G
agggataacgaaaaccttgagatgacggcggggcanttgtaccacttccctggacgacttcccctagaggg

SEQ ID NO: 57 - DNA, 71 bp, artificial sequence
  Synthesized
  misc_feature (36)..(36): n=C/T
ctccttttcaatacacctttcttttttcagtacatntatatctctactctttgagaagtatttaggtcgtt

SEQ ID NO: 58 - DNA, 71 bp, artificial sequence
  Synthesized
  misc_feature (36)..(36): n=C/T
ggatttcatgtgagtacttgcaacagttatggcatngtgagaatccatgatatgccactgaataactacac

SEQ ID NO: 59 - DNA, 71 bp, artificial sequence
  Synthesized
  misc_feature (36)..(36): n=A/G
gaagaaggaagactcgcaaacccgacgcagcgcatnggcgcgcaggcgcacctgcctcaaaagcaccgacg

SEQ ID NO: 60 - DNA, 71 bp, artificial sequence
  Synthesized
  misc_feature (36)..(36): n=C/T
tctcgctatcaagatctagcatttgctgaaagatgnatggatgtgcagattggtaaacattgtataatgga

SEQ ID NO: 61 - DNA, 71 bp, artificial sequence
  Synthesized
  misc_feature (36)..(36): n=A/G
cgcaagggtgaaattgagttctacaagttaccccgnggtagaggtagaggaagaggaagtggaaaatcgaa

SEQ ID NO: 62 - DNA, 71 bp, artificial sequence
  Synthesized
  misc_feature (36)..(36): n=A/C
ccacggtagtgtcaatttgagaacaaaaatttcaangggtgttcaaagaatgaagatttgaagttcagatg

SEQ ID NO: 63 - DNA, 71 bp, artificial sequence
  Synthesized
  misc_feature (36)..(36): n=C/T
gtcgctcctggacggtgtagcccttctgacgtcgtncgtagggtcatgtgtagccatactcctggcatggc

SEQ ID NO: 64 - DNA, 71 bp, artificial sequence
  Synthesized
  misc_feature (36)..(36): n=G/T
gcgtagggacgacactacatgattgtggatctactnaatgaagaaaaaaaattactgcatcggtgctgtaa

SEQ ID NO: 65 - DNA, 71 bp, artificial sequence
  Synthesized
  misc_feature (36)..(36): n=G/T
taacacggtttgataggattttaagatttttgttgnaaaaccgctcgtgctgaaaaatggctgaattctta

SEQ ID NO: 66 - DNA, 71 bp, artificial sequence
  Synthesized
  misc_feature (36)..(36): n=A/G
ttgagttctttggcaggccacattaacctagtgcanttttatgatgcttttgaggatgaagaaaatgtata

SEQ ID NO: 67 - DNA, 71 bp, artificial sequence
  Synthesized
  misc_feature (36)..(36): n=A/G
actgcttctcaagtcactataagatatacatgaagnaataaaacaagacaaaaaacaagcttcatcacacc

SEQ ID NO: 68 - DNA, 71 bp, artificial sequence
  Synthesized
  misc_feature (36)..(36): n=C/T
agaaggcgccaaggccactgctagagccgtcatggnaggacaacatttttgcgttgtataacccgcaaggt

SEQ ID NO: 69 - DNA, 71 bp, artificial sequence
  Synthesized
  misc_feature (36)..(36): n=A/G
accgactcttcaccagtttccttgtttcagagaaanacagttccttcctcaaccactttcagtcttaccag

SEQ ID NO: 70 - DNA, 71 bp, artificial sequence
  Synthesized
  misc_feature (36)..(36): n=C/G
gggtagaaaatcgagtgtaattaagataacgacttnttggtcctgtaattaccccgtttgtacagtacaac

SEQ ID NO: 71 - DNA, 71 bp, artificial sequence
  Synthesized
  misc_feature (36)..(36): n=A/G
cgcgtatcttttcttcttctgtgacaaataaaacancacttttccgtatttggaaatcctgacgtaagctg

SEQ ID NO: 72 - DNA, 71 bp, artificial sequence
  Synthesized
  misc_feature (36)..(36): n=A/C
gtccaacagaaaggcaccggctaatccaatctgatntgacactagacagagttcgaacacggaccatacta

SEQ ID NO: 73 - DNA, 71 bp, artificial sequence
  Synthesized
  misc_feature (36)..(36): n=A/C
cccttttttatgttgctagctgttgcttgtgttcanagtccaagatccaaagaacgcacatccttgcctcc

SEQ ID NO: 74 - DNA, 71 bp, artificial sequence
  Synthesized
  misc_feature (36)..(36): n=A/G
taggaatcctaattgcaccgacgggaaatgaaaatntattttagtagcggttcttaccaaaaaatgacact

SEQ ID NO: 75 - DNA, 71 bp, artificial sequence
  Synthesized
  misc_feature (36)..(36): n=A/G
ttctccatgacaacagcataaacttaaaaggtttcngaacattgttaaatcaaatgaattccgcatctact

SEQ ID NO: 76 - DNA, 71 bp, artificial sequence
  Synthesized
  misc_feature (36)..(36): n=A/C
gctggcctcatacttatgctcgtcgccaacgctacnagctgcaacaagttgatatcaaagaacataacagc

SEQ ID NO: 77 - DNA, 71 bp, artificial sequence
  Synthesized
  misc_feature (36)..(36): n=A/G
ctacttgtgcttctgtttctaaacttctcatgctcngtttgcatgcagtgccatatagtgctccatttcac

SEQ ID NO: 78 - DNA, 71 bp, artificial sequence
  Synthesized
  misc_feature (36)..(36): n=A/G
tctagcgtagatagacccccaacaacacctttctanaaaatgcttgataggcccatcccacatgtcaagaa

SEQ ID NO: 79 - DNA, 71 bp, artificial sequence
  Synthesized
  misc_feature (36)..(36): n=C/T
gttgagtttctgtcgcagctgcaaagatatgcttgngtaaacaattctggttgatcggcatactacaaaga

SEQ ID NO: 80 - DNA, 71 bp, artificial sequence
  Synthesized
  misc_feature (36)..(36): n=A/C
tatgaaaagttagtaccactatttaaattatactcnctccctccgttccaaaaaaaaaaaatattcgtttt

SEQ ID NO: 81 - DNA, 71 bp, artificial sequence
  Synthesized
  misc_feature (36)..(36): n=C/T
gcaacgtcagggttgtgggctactgggttgcgttgngccatgcgcgtacgctcacatccctcgtccagcta

SEQ ID NO: 82 - DNA, 71 bp, artificial sequence
  Synthesized
  misc_feature (36)..(36): n=A/C
aggccgcgcagagagcgaccagctcccttccttccnactcagcccgatctaatgccgtgtgtagcagttac

SEQ ID NO: 83 - DNA, 71 bp, artificial sequence
  Synthesized
  misc_feature (36)..(36): n=C/G
ggatattctctgggttagaaatagtcctggggtcantacaaacctttagtatgaattgatcaagttcgtgg

SEQ ID NO: 84 - DNA, 71 bp, artificial sequence
  Synthesized
  misc_feature (36)..(36): n=C/T
tcctctagcgccacacatgctgcatgctcggatctnccatgcgtagtaaaattcttcacctctcgtgtggg

SEQ ID NO: 85 - DNA, 71 bp, artificial sequence
  Synthesized
  misc_feature (36)..(36): n=A/G
atgaagctgatgcagaagatgttgccatctaagccnaagcgatagctgccagggtcacgaagagggctaca

SEQ ID NO: 86 - DNA, 71 bp, artificial sequence
  Synthesized
  misc_feature (36)..(36): n=C/T
cgcactctactggtcttcccagctcccagatgctcngccagcatagccttcacagccacaaaaacgtaggt

SEQ ID NO: 87 - DNA, 71 bp, artificial sequence
  Synthesized
  misc_feature (36)..(36): n=A/G
aacacatattttgtaggttctatgagccatcatcanaagaacacaaaccacgtgcaggcaataaataaaat

SEQ ID NO: 88 - DNA, 71 bp, artificial sequence
  Synthesized
  misc_feature (36)..(36): n=A/G
gcaccttttctgaaatctatcaatccaaagcctctnaggtgctcaaaaacattcctaagggcatttagaac

SEQ ID NO: 89 - DNA, 71 bp, artificial sequence
  Synthesized
  misc_feature (36)..(36): n=C/G
cgctctcaatcccacctggttgatagccacgggggncctgcggataaaatcccgagaaaggattttccttg

SEQ ID NO: 90 - DNA, 71 bp, artificial sequence
  Synthesized
  misc_feature (36)..(36): n=C/T
gactctgactttttcctctgcttctagtatcaagtnaggtccaaaaatttccctctctccagcttgtgacc

SEQ ID NO: 91 - DNA, 71 bp, artificial sequence
  Synthesized
  misc_feature (36)..(36): n=C/T
gcgctctgctgaggccttgtcatatggttcctcttngttctttatgtacctgatgatcggctctctccagt

SEQ ID NO: 92 - DNA, 72 bp, artificial sequence
  Synthesized
  misc_feature (36)..(36): n=A/T
cccattgcttggtaccaattcaccgcagcttttagatggaaattatattccaccgggtctaatggcaatgaa

SEQ ID NO: 93 - DNA, 71 bp, artificial sequence
  Synthesized
  misc_feature (36)..(36): n=C/T
gagatcactgtagatcctcagcatggactcgacaancctgttatgttttgggatgacattattaaaggtgt

SEQ ID NO: 94 - DNA, 71 bp, artificial sequence
  Synthesized
  misc_feature (36)..(36): n=C/T
tatacttagattcaaagggcaggtgggggtgtttcnggatccgaattatgtatcgatctccttgggcagaa

SEQ ID NO: 95 - DNA, 71 bp, artificial sequence
  Synthesized
  misc_feature (36)..(36): n=A/C
taggggcaagagcattgtcgccaccattgctggctnagggcagtcatggtgaaccaccgtctctagacacg

SEQ ID NO: 96 - DNA, 71 bp, artificial sequence
  Synthesized
  misc_feature (36)..(36): n=C/T
cacatgcttttcctacttcaatgttcttcattttgntgtcacaccattcactactaacaaagagaactttc

SEQ ID NO: 97 - DNA, 71 bp, artificial sequence
  Synthesized
  misc_feature (36)..(36): n=C/T
gctctaactgtcgtgatatcgattgtccgacaccanccccgagggcacgttcggacccaagcgcggcctcc

SEQ ID NO: 98 - DNA, 71 bp, artificial sequence
  Synthesized
  misc_feature (36)..(36): n=C/T
tttggtagctccaaacataccatggttttgataaanagtgtttagatacaacattgtaaactatagtatta

SEQ ID NO: 99 - DNA, 71 bp, artificial sequence
  Synthesized
  misc_feature (36)..(36): n=C/T
attaaaaagagatccctgtttatttcttgatactcnctgatgtgtacgtttaattgtgaaccagcccctgc

SEQ ID NO: 100 - DNA, 71 bp, artificial sequence
  Synthesized
  misc_feature (36)..(36): n=A/G
gccagaaacagaggggctcttgtgctaatgtgtacnacgaaggggtaagtacagatctcagccatccgatt

SEQ ID NO: 101 - DNA, 71 bp, artificial sequence
  Synthesized
  misc_feature (36)..(36): n=C/T
gtaataaaaactcaccacaacccttggctcttccgngagtcattgtaatattgtaccgagtggggcaagag

SEQ ID NO: 102 - DNA, 71 bp, artificial sequence
  Synthesized
  misc_feature (36)..(36): n=C/T
tcctcgctctgatcctcctccagtgcactgctccgntccggcgacctcgctgccggcccggcgctccccgg

SEQ ID NO: 103 - DNA, 71 bp, artificial sequence
  Synthesized
  misc_feature (36)..(36): n=A/G
tagctggccgaattactcaccgaagtcgtgtacccncctcctgctgtggccagcttaccgcgttgcttcac

SEQ ID NO: 104 - DNA, 71 bp, artificial sequence
  Synthesized
  misc_feature (36)..(36): n=C/T
agaatggaatttccattgtcattggtgcattcccantattatgtttacaaaaggctagcattagttggaga

SEQ ID NO: 105 - DNA, 72 bp, artificial sequence
  Synthesized
  misc_feature (36)..(36): n=A/T
tggacctgccacctttcgacgttgcggttgttcaaattccttcttgagtgtctctgatcctgcaacccgttc

SEQ ID NO: 106 - DNA, 71 bp, artificial sequence
  Synthesized
  misc_feature (36)..(36): n=C/T
tatgggggttacttagagtaggaattggcaagcttnggtgtatgtcaaactcgatgatgaatttaaacata

SEQ ID NO: 107 - DNA, 71 bp, artificial sequence
  Synthesized
  misc_feature (36)..(36): n=A/G
tggggatatcctcctatgggacagtcataaacgtcncagggatttgatccatggtcgacacaaggatcata

SEQ ID NO: 108 - DNA, 71 bp, artificial sequence
  Synthesized
  misc_feature (36)..(36): n=A/C
atccaagccaccagaacgcaaggagcctataacaantagctgttaaataaaagatacaatactgtattaaa

SEQ ID NO: 109 - DNA, 71 bp, artificial sequence
  Synthesized
  misc_feature (36)..(36): n=A/C
atttacttgtgatgaaaattcatccagcagcacagnactcagcagttaattagttagttcaacactgacag

SEQ ID NO: 110 - DNA, 71 bp, artificial sequence
  Synthesized
  misc_feature (36)..(36): n=A/C
gaatcggcgacagtaagaaccatgcccgaaaaaacngaaacaaacatgaccatatcaataagtgaaaagcg

SEQ ID NO: 111 - DNA, 71 bp, artificial sequence
  Synthesized
  misc_feature (36)..(36): n=A/G
ttaagttcacacagaagaaatgaaagctcaatatcngcgggcacttactgaaggaatcccaagaagctttt

SEQ ID NO: 112 - DNA, 71 bp, artificial sequence
  Synthesized
  misc_feature (36)..(36): n=C/T
atacacgagacaaaagtatgaatcgcgtgcatatcnacgttgttgtcctcactattgaatattgacacccc

SEQ ID NO: 113 - DNA, 71 bp, artificial sequence
  Synthesized
  misc_feature (36)..(36): n=A/G
cttgtatctaaatgtttgtagtagggatacaagccnaccacgagagagagtggatttgaagtccctagtgg

SEQ ID NO: 114 - DNA, 71 bp, artificial sequence
  Synthesized
  misc_feature (36)..(36): n=G/T
tataccacattaattaattctaggcatgtgtgtttngtttcacattataaagtgggatttgtcaaactttg

SEQ ID NO: 115 - DNA, 71 bp, artificial sequence
  Synthesized
  misc_feature (36)..(36): n=A/G
caaaaatccatagatgtttttgacaatggggcatancccctatttagttagaaaataggcaacataggttc

SEQ ID NO: 116 - DNA, 71 bp, artificial sequence
  Synthesized
  misc_feature (36)..(36): n=C/T
tgaacaaaggcaacaaaagttagccaacatgcggcnagacggaaaggctatgctaggcgtcctaaacaata

SEQ ID NO: 117 - DNA, 71 bp, artificial sequence
  Synthesized
  misc_feature (36)..(36): n=C/T
aagttcagtgcactacgctgacactccctcctctcnctgcgtgcactgctgctagtaccagcagcaataag

SEQ ID NO: 118 - DNA, 71 bp, artificial sequence
  Synthesized
  misc_feature (36)..(36): n=A/G
agagagagagctcaaagctgtaccactcgagctggnaaaaaaaaggtcctccacccaataatcttggtgag

SEQ ID NO: 119 - DNA, 71 bp, artificial sequence
  Synthesized
  misc_feature (36)..(36): n=G/T
tttattattagagtttcgtggcggcggtttggttgnattggtccgcatttatgaaggaatgttctccccct

SEQ ID NO: 120 - DNA, 71 bp, artificial sequence
  Synthesized
  misc_feature (36)..(36): n=C/T
ttaccaaaataacacacatgaccacatctcaatcangtgttcacaaaattattttagttcctagaaataat

SEQ ID NO: 121 - DNA, 71 bp, artificial sequence
  Synthesized
  misc_feature (36)..(36): n=A/G
actagaaatccatgttgctcaccggcaaacatgtcnggcggcgtgaatttgaggctcggcgggatctcccc

SEQ ID NO: 122 - DNA, 71 bp, artificial sequence
  Synthesized
  misc_feature (36)..(36): n=A/G
gactgaagagagcaatgcagagatgattcgccttcncccactgcttgatccatcgtatcgtatcgtatcgg

SEQ ID NO: 123 - DNA, 71 bp, artificial sequence
  Synthesized
  misc_feature (36)..(36): n=C/T
ggcaaccaagcgtgtagcagctcggacgggggtcgnccgtggagggtcaccggcgactagaaatagcaggc

SEQ ID NO: 124 - DNA, 72 bp, artificial sequence
  Synthesized
  misc_feature (36)..(36): n=A/T
ttctctaaaatttagattacagggcgctttagataatactgctcgagagagtcctactgcagcgcactgcgc

SEQ ID NO: 125 - DNA, 71 bp, artificial sequence
  Synthesized
  misc_feature (36)..(36): n=C/T
tgcacgcgctggagccgatgtgactacaaccacganacttgggcctatcgctgcggatgtaggacctctgt

SEQ ID NO: 126 - DNA, 71 bp, artificial sequence
  Synthesized
  misc_feature (36)..(36): n=C/T
tacagttcaccacctctttctaacaataacaaaatnatctaaaaccttgcctccttgaacatggaccggaa

SEQ ID NO: 127 - DNA, 71 bp, artificial sequence
  Synthesized
  misc_feature (36)..(36): n=C/T
atggttctgatgggccgagcgtccaactgtatgagntggtcgtctaactcagaccaagagacggtggagaa

SEQ ID NO: 128 - DNA, 71 bp, artificial sequence
  Synthesized
  misc_feature (36)..(36): n=C/T
gaaaggaggcgttccactcagctgagatatgcatanagcaaatattccaagcccgaaagttctgaagaaat

SEQ ID NO: 129 - DNA, 71 bp, artificial sequence
  Synthesized
  misc_feature (36)..(36): n=A/G
atacacatggatccgatatggatttgtagatctccncccgctttcgacttcgtatgttaccgattgtgatg

SEQ ID NO: 130 - DNA, 71 bp, artificial sequence
  Synthesized
  misc_feature (36)..(36): n=A/C
gacaagatgcttccatgagttagggactactacatngggaaacaaaagcagattagttctcagtccgctaa

SEQ ID NO: 131 - DNA, 71 bp, artificial sequence
  Synthesized
  misc_feature (36)..(36): n=A/C
ttctgacagcggctaggttcaattcgatcactctcnggacgaaacgaagcggacgtgtacagaacatgacg

SEQ ID NO: 132 - DNA, 71 bp, artificial sequence
  Synthesized
  misc_feature (36)..(36): n=C/T
tatatatgcgcgcgcaaactgccaacgaccttttcnctttgagcgtgagtgacacagatgtatctgaatca

SEQ ID NO: 133 - DNA, 71 bp, artificial sequence
  Synthesized
  misc_feature (36)..(36): n=C/T
cgtcgccgaggccaggtggttctgtaggtccaaacnagctgctgcaagtccactcccagtcaccaagttcg

SEQ ID NO: 134 - DNA, 71 bp, artificial sequence
  Synthesized
  misc_feature (36)..(36): n=G/T
acattgggttataaggtcaagctttttggtcgacanatggcatcataaacatgctagaaaaagcacaataa

SEQ ID NO: 135 - DNA, 71 bp, artificial sequence
  Synthesized
  misc_feature (36)..(36): n=G/T
agagaagacctccacgacggttgtggtgcagcatgncgggagtgctgttgcagctcacgattgtcagagtg

SEQ ID NO: 136 - DNA, 71 bp, artificial sequence
  Synthesized
  misc_feature (36)..(36): n=C/T
gttcaaaagtttacttatgccaggaatgagtgcaanaatatcacatagcctaaactaatgctatgtgattg

SEQ ID NO: 137 - DNA, 71 bp, artificial sequence
  Synthesized
  misc_feature (36)..(36): n=A/C
ttattatcgatgccttagggggattgaaatcaaatnctcaacattggcacccacctccagtgattccacga

SEQ ID NO: 138 - DNA, 71 bp, artificial sequence
  Synthesized
  misc_feature (36)..(36): n=C/T
tccatcgtgaccatatcagtggtgatgccaagattngagccgactacttctgtgcataacccgtgtacacg

SEQ ID NO: 139 - DNA, 71 bp, artificial sequence
  Synthesized
  misc_feature (36)..(36): n=C/T
agtcgatctttacttcgttcagcgcccaaattgtgntggggagcttggtctctctgctctgcagaaggttg

SEQ ID NO: 140 - DNA, 71 bp, artificial sequence
  Synthesized
  misc_feature (36)..(36): n=G/T
gatgcaattgctgcactgaagcgttatataataatnttctacttgatggaaaagcaatgaagaaagaagtc

SEQ ID NO: 141 - DNA, 71 bp, artificial sequence
  Synthesized
  misc_feature (36)..(36): n=C/T
ataaaagctgcatcggcaagccgaacacaaacctangatgaagagagcagctcacctgcagaggagaaatg

SEQ ID NO: 142 - DNA, 71 bp, artificial sequence
  Synthesized
  misc_feature (36)..(36): n=A/C
acaggacaagtcgttttcgccaacaataagaaatgnttctatctagtatctagaagattacatatctagaa

SEQ ID NO: 143 - DNA, 71 bp, artificial sequence
  Synthesized
  misc_feature (36)..(36): n=C/T
ttacatcagttattgtgtttcaggtgtacatataanatttcattaatagttgtcttccttctttttttgta

SEQ ID NO: 144 - DNA, 71 bp, artificial sequence
  Synthesized
  misc_feature (36)..(36): n=A/G
agggaggatgggccaagcgaagaagatgagggtccnaggaaccaaaagcaaggtggataagatagggtgag

SEQ ID NO: 145 - DNA, 71 bp, artificial sequence
  Synthesized
  misc_feature (36)..(36): n=A/G
aatttgcttggctgttgctgcgaaggtgatgaaagnttgcttgttgcagaatacatgcccaatgatacgct

SEQ ID NO: 146 - DNA, 71 bp, artificial sequence
  Synthesized
  misc_feature (36)..(36): n=A/G
gttccaagatgctttgacagggcaacatgaccattnaatcggccgggcccacaagttcacccaattagacc

SEQ ID NO: 147 - DNA, 71 bp, artificial sequence
  Synthesized
  misc_feature (36)..(36): n=A/G
tcccggaggctctgtaaaactttgaaacaaggcgtntagatatctaaaaacaagaatatctagttagatcg

SEQ ID NO: 148 - DNA, 71 bp, artificial sequence
  Synthesized
  misc_feature (36)..(36): n=C/T
tggttaggtggtagtacaaaaatgatattcgatttnaatgctgttgggggtactgctagtgaataggaccg

SEQ ID NO: 149 - DNA, 71 bp, artificial sequence
  Synthesized
  misc_feature (36)..(36): n=A/G
taagctccttggttctacagtcccttgcccttcttnacctcataatccagatacatgtgtaaaaacagctt

SEQ ID NO: 150 - DNA, 71 bp, artificial sequence
  Synthesized
  misc_feature (36)..(36): n=C/T
cgtcagaccctgagccatggtccaatgagtacggtnggactagtatgatgcaacgaggacctctctaatta

SEQ ID NO: 151 - DNA, 71 bp, artificial sequence
  Synthesized
  misc_feature (36)..(36): n=C/T
ggattcatgtcgtcaccccatcaccttctagtggangccaatcgacccccacttctcctagctttgggcga

SEQ ID NO: 152 - DNA, 71 bp, artificial sequence
  Synthesized
  misc_feature (36)..(36): n=A/G
agacatagcgtagccttagcttagatctatttgtgncctagcacaaccatctctcttcgactctacgtcga

SEQ ID NO: 153 - DNA, 71 bp, artificial sequence
  Synthesized
  misc_feature (36)..(36): n=A/C
gctttcgcttccacttccttgcaagttattcttttnccagagaacttcaatggctggaggtagaggtgcta

SEQ ID NO: 154 - DNA, 71 bp, artificial sequence
  Synthesized
  misc_feature (36)..(36): n=A/G
tgacttttataccatgtaggaatataatggagggtntagtgattcttcatgagactattcatgaatttcat

SEQ ID NO: 155 - DNA, 71 bp, artificial sequence
  Synthesized
  misc_feature (36)..(36): n=G/T
tctaggcttctacttcttggtgtcttagattttttnaatgtcttcaaggtcttcaacatggatactaatgt

SEQ ID NO: 156 - DNA, 71 bp, artificial sequence
  Synthesized
  misc_feature (36)..(36): n=A/G
agtcatgtggtattccccccagtgattattcccatngcattctcatagatggactctgcaagcaaggtaaa

SEQ ID NO: 157 - DNA, 71 bp, artificial sequence
  Synthesized
  misc_feature (36)..(36): n=C/T
cactctttattgagtatatcatctattgtctctctnagatgcttgttgtcatagttcgcaattcctatctg

SEQ ID NO: 158 - DNA, 71 bp, artificial sequence
  Synthesized
  misc_feature (36)..(36): n=A/C
ccgggaatatccaatctaacggagtaaatacaacantgcgcgtacagtaaacagtgcgcaccaaattacac

SEQ ID NO: 159 - DNA, 71 bp, artificial sequence
  Synthesized
  misc_feature (36)..(36): n=G/T
tgtctaattctctagtgtgtgggtcagtaccaactngttcgactctagcatagttgatatcgatcgggcca

SEQ ID NO: 160 - DNA, 71 bp, artificial sequence
  Synthesized
  misc_feature (36)..(36): n=G/T
gagctccaaaacatgggaccagccagggtcgcagtngcactcgtagccgggaggaagaagggccggagccg

SEQ ID NO: 161 - DNA, 71 bp, artificial sequence
  Synthesized
  misc_feature (36)..(36): n=G/T
tattagatgagataggataaatgctacctgctggcncctagagacagccttagctagctcgagccgacttt

SEQ ID NO: 162 - DNA, 71 bp, artificial sequence
  Synthesized
  misc_feature (36)..(36): n=A/G
tccttaagcgcccaaactccatagactcatcgcccnccataaggtgagcacgagattccgctggcgacgat

SEQ ID NO: 163 - DNA, 71 bp, artificial sequence
  Synthesized
  misc_feature (36)..(36): n=A/G
ttataactagatccaatatgtttgaatatgcagaantgtttacttgccctagttttactctaggacatgtc

SEQ ID NO: 164 - DNA, 71 bp, artificial sequence
  Synthesized
  misc_feature (36)..(36): n=A/T
tattcaaagacaagtgattcaatggcttcaaggacngggcttcaatggcttccacgaactcaccctccttc

SEQ ID NO: 165 - DNA, 71 bp, artificial sequence
  Synthesized
  misc_feature (36)..(36): n=C/T
ataattaggaagtgtgtggcgactcttttgttgttngaaaaagatgcttgcttttttccttgagagatgaa

SEQ ID NO: 166 - DNA, 71 bp, artificial sequence
  Synthesized
  misc_feature (36)..(36): n=G/T
tgacttgatttttggcttgaatggcaaatgctcttntgtaactgcatgtggtacatctggactgtggatgg

SEQ ID NO: 167 - DNA, 71 bp, artificial sequence
  Synthesized
  misc_feature (36)..(36): n=C/G
ccactgagattgggctggatcgggttaaattgagcncagtactgttgatacttttctttttccttttctac

SEQ ID NO: 168 - DNA, 71 bp, artificial sequence
  Synthesized
  misc_feature (36)..(36): n=A/G
tctaggatattcactggattcacctcatgcacatgntcatggatactgagccacagttttaaagtcttgag

SEQ ID NO: 169 - DNA, 71 bp, artificial sequence
  Synthesized
  misc_feature (36)..(36): n=A/G
ttgtgcaaaaaacggccacagtgacacagccttatntataatcaagctgtgagcttgtgactgtgtattct

SEQ ID NO: 170 - DNA, 71 bp, artificial sequence
  Synthesized
  misc_feature (36)..(36): n=A/G
agggcaacgaaatgttcactgccttacagcagagcntgaaggcttcgagagccagcgcccagtcaaaggca

SEQ ID NO: 171 - DNA, 71 bp, artificial sequence
  Synthesized
  misc_feature (36)..(36): n=G/T
cactgccatcacagattcacagtgtggcatgcacgncagcgtttactagtcgtctaaaggtactgacaagt

SEQ ID NO: 172 - DNA, 71 bp, artificial sequence
  Synthesized
  misc_feature (36)..(36): n=G/T
ggcgacgccatctttttgtggtttccttttttttgntttgcttaatgacgaattgggctgggccgctgggc

SEQ ID NO: 173 - DNA, 71 bp, artificial sequence
  Synthesized
  misc_feature (36)..(36): n=A/C
gcggaccagaagagtactccttcggtccttcccttnctaatcctttagtagtagagaagaggacgatcggg

SEQ ID NO: 174 - DNA, 71 bp, artificial sequence
  Synthesized
  misc_feature (36)..(36): n=A/G
ttggcgcttgcacgcactattatattggttgtaccnagagggactataagtcttatcagatcacactaact

SEQ ID NO: 175 - DNA, 71 bp, artificial sequence
  Synthesized
  misc_feature (36)..(36): n=C/T
caatcatcaagaggcgaggcgaacaaagcttttctncgagtattaaaatattcatctggggcagtgctcga

SEQ ID NO: 176 - DNA, 71 bp, artificial sequence
  Synthesized
  misc_feature (36)..(36): n=C/T
atcaagctgagtaatactgacaacctgtactagttnggtagttgtaactagcacctgagctacaaggtctg

SEQ ID NO: 177 - DNA, 71 bp, artificial sequence
  Synthesized
  misc_feature (36)..(36): n=A/G
aaacatttgaaccataaaagccataagatagcaatntttcttccatatcactttcacttattgcttgagtt

SEQ ID NO: 178 - DNA, 71 bp, artificial sequence
  Synthesized
  misc_feature (36)..(36): n=A/G
tcttaagaccttcttatcctcaacatccatctgtanatcaaattcttgaagaaggtcccataaggagagaa

SEQ ID NO: 179 - DNA, 71 bp, artificial sequence
  Synthesized
  misc_feature (36)..(36): n=A/G
gttgtccccacgacaatctagtacaacctttgcttntatgttgcacctttgaccctgagaagtggtgcctc

SEQ ID NO: 180 - DNA, 71 bp, artificial sequence
  Synthesized
  misc_feature (36)..(36): n=G/T
tctatacttagattcacattcaaaatttgtgtgatnagattataccataaccccaaattctgtccgaccag

SEQ ID NO: 181 - DNA, 71 bp, artificial sequence
  Synthesized
  misc_feature (36)..(36): n=A/C
acacaaaatgctgccacaaataaaattttggaaaanacgcacacactatggtcaagtatatggaaaacaag

SEQ ID NO: 182 - DNA, 71 bp, artificial sequence
  Synthesized
  misc_feature (36)..(36): n=C/T
agtccggcgctgttctgtaagtcgtctaagcattgngttcactggctcactgcagctactctacaccagct

SEQ ID NO: 183 - DNA, 71 bp, artificial sequence
  Synthesized
  misc_feature (36)..(36): n=A/G
ttctcctcctcacccttcttgatggagagcgccctnccgcgagttgctttcagtacaagcatcgtagctcc

SEQ ID NO: 184 - DNA, 71 bp, artificial sequence
  Synthesized
  misc_feature (36)..(36): n=A/C
agtgaacatgttgttttgaaaagctaactccattcntaaggtacattcatgtttgagtatattagaattag

SEQ ID NO: 185 - DNA, 71 bp, artificial sequence
  Synthesized
  misc_feature (36)..(36): n=A/C
atggagataccattattgtactaatttatcaggaanagttgtaaattgaactggttggtttggtgtgtcat

SEQ ID NO: 186 - DNA, 71 bp, artificial sequence
  Synthesized
  misc_feature (36)..(36): n=A/G
tcgttttttttgggtggtggtcgcataggcttgtgncctaagacaaagtagacaagcacgtcgggtcggat

SEQ ID NO: 187 - DNA, 71 bp, artificial sequence
  Synthesized
  misc_feature (36)..(36): n=A/G
ctcggggtggagttcgagtttgtcccattgctgcgntcagtgcacgagctggatcggtcggatttcttggt

SEQ ID NO: 188 - DNA, 71 bp, artificial sequence
  Synthesized
  misc_feature (36)..(36): n=A/G
accttacctagtcgggccgggccaatgtgttgggcnggctcgggcttggggcaaaaattaaacctgtgggc

SEQ ID NO: 189 - DNA, 71 bp, artificial sequence
  Synthesized
  misc_feature (36)..(36): n=A/G
atgtttggttcgggagcgaatagagtggttggagcngagcgactctaaatcgggaatattaccactagact

SEQ ID NO: 190 - DNA, 71 bp, artificial sequence
  Synthesized
  misc_feature (36)..(36): n=A/G
ttctccctctctgatcctcaccgaaggtgctctccnattgggtcgtcgcgatggttcgatttgatggatga

SEQ ID NO: 191 - DNA, 71 bp, artificial sequence
  Synthesized
  misc_feature (36)..(36): n=A/C
gccagatccgctcgaggctgaccagattcaggtccntccgcagtggtgcttccattattcataggcctgca

SEQ ID NO: 192 - DNA, 71 bp, artificial sequence
  Synthesized
  misc_feature (36)..(36): n=A/G
tgtcgagatatctgtttaggtttaggggtcgtttgnaaatcgagttactcagatggcaactatatagtggt

SEQ ID NO: 193 - DNA, 71 bp, artificial sequence
  Synthesized
  misc_feature (36)..(36): n=G/T
tgtccccaatctgtaaaaaacaacgagcacccggcngtggtgtttggtagtacttttttatactgcttgta

SEQ ID NO: 194 - DNA, 71 bp, artificial sequence
  Synthesized
  misc_feature (36)..(36): n=A/G
tggttgatggagactgctagtgcctgtattgtatcnccaatcatgtttactctatagtgtatacaaatcgt

SEQ ID NO: 195 - DNA, 71 bp, artificial sequence
  Synthesized
  misc_feature (36)..(36): n=A/G
ccagatactctacctttttaagtgtttaacgcctcnatgatgacaaaatacaagtaatggtgtcataacct

SEQ ID NO: 196 - DNA, 71 bp, artificial sequence
  Synthesized
  misc_feature (36)..(36): n=A/G
tactattgcttgagtgtcgccttgttcaacttctcnaccaaggcagagagagctttcatccggcagccgct

SEQ ID NO: 197 - DNA, 71 bp, artificial sequence
  Synthesized
  misc_feature (36)..(36): n=C/T
gctgactcttcttgaattccttcctgctcattttcntgtgctggcattgcgaatcgcgcaaccgcaggaac

SEQ ID NO: 198 - DNA, 71 bp, artificial sequence
  Synthesized
  misc_feature (36)..(36): n=A/C
tttttgcatagtttgatcgctaatgctggtaatgtncaggtcgatgtgaagagggcagaaaagaaagaaac

SEQ ID NO: 199 - DNA, 71 bp, artificial sequence
  Synthesized
  misc_feature (36)..(36): n=C/T
ggtgtcattgttgatccataactcacgcttatttangaagcaagagtgacatttcttcggatccataacta

SEQ ID NO: 200 - DNA, 71 bp, artificial sequence
  Synthesized
  misc_feature (36)..(36): n=A/G
tcgataacgatgtggcaagtctcccccggagctttngggccgaccagactctccaccgagacaatggtggc

SEQ ID NO: 201 - DNA, 71 bp, artificial sequence
  Synthesized
  misc_feature (36)..(36): n=A/C
gattgaagacgacctgcatgcggatgagaccatagntattttcgtaggaaacaattacaacacctacactt

SEQ ID NO: 202 - DNA, 71 bp, artificial sequence
  Synthesized
  misc_feature (36)..(36): n=A/C
aactcatgaacacgaactgctctgctgagcacactnaaaccaaaactagattattggttcgtcattattac

SEQ ID NO: 203 - DNA, 71 bp, artificial sequence
  Synthesized
  misc_feature (36)..(36): n=A/G
gcaattctacttgaggttattggttaatcattatcntatcacgtggcatccaatgttaatgttcatcttgg

SEQ ID NO: 204 - DNA, 71 bp, artificial sequence
  Synthesized
  misc_feature (36)..(36): n=C/T
caaattcaagctgggctatgattgggcctctctccntgctaacatgatgggctcggctcatctagcacagg

SEQ ID NO: 205 - DNA, 71 bp, artificial sequence
  Synthesized
  misc_feature (36)..(36): n=A/G
gaatagaatccctagttcgtcccggcgcgcgcgtcncgatcccgacaccaagctgggcaaaaaccaaaact

SEQ ID NO: 206 - DNA, 71 bp, artificial sequence
  Synthesized
  misc_feature (36)..(36): n=G/T
actacttaaatttttacttgtggaaacggcatacangcagttaattctggattctagcattggagaattgg

SEQ ID NO: 207 - DNA, 71 bp, artificial sequence
  Synthesized
  misc_feature (36)..(36): n=A/G
gcggcgatgacgaggcaagcacgacgataagatcgntggggatggcgatgttccggcaggacgaacccgaa

SEQ ID NO: 208 - DNA, 71 bp, artificial sequence
  Synthesized
  misc_feature (36)..(36): n=A/C
gtaaaatttaaggattggatcatatttggatcttgntctatttctattcattcttgaactaaaattaatta

SEQ ID NO: 209 - DNA, 71 bp, artificial sequence
  Synthesized
  misc_feature (36)..(36): n=A/G
aaggacggggtgcggcatcaaggccgggaagcacgngccacgcaggaggacaacagatgtaagacccaaaa

SEQ ID NO: 210 - DNA, 71 bp, artificial sequence
  Synthesized
  misc_feature (36)..(36): n=A/C
acactctttctcttagtggaaagacccagatgatgngggcttattaaggctttacttacaaaggccaaagg

SEQ ID NO: 211 - DNA, 71 bp, artificial sequence
  Synthesized
  misc_feature (36)..(36): n=C/T
cgtggcgtgccggagaaccggttctacaaccctccncacgtacgtcgacagcagcagcaggagcaacagcg

SEQ ID NO: 212 - DNA, 71 bp, artificial sequence
  Synthesized
  misc_feature (36)..(36): n=C/T
gtttgcaccagcagatatgttctccacatgagaccnagagtgaaaaaaaatcactaaaacattaactaccc

SEQ ID NO: 213 - DNA, 71 bp, artificial sequence
  Synthesized
  misc_feature (36)..(36): n=A/G
ctggctaaagcaatgcaaagtcctggtttcctagcncagtttgtacagcaaaatgagaagagcagaagaag

SEQ ID NO: 214 - DNA, 71 bp, artificial sequence
  Synthesized
  misc_feature (36)..(36): n=C/T
cgtctcttaacatctccccgttgatcttctccgttnttctgcagtgatgtgactgaagagatggcaagaag

SEQ ID NO: 215 - DNA, 71 bp, artificial sequence
  Synthesized
  misc_feature (36)..(36): n=A/G
cattacacgctagaggccctttcgcagctaatgttngatgtagtgtactggaattctaatttcatctcatg

SEQ ID NO: 216 - DNA, 71 bp, artificial sequence
  Synthesized
  misc_feature (36)..(36): n=A/G
ccctcagcaaaagtacgcttgtctactgcaataacntcaacgtcgtctaccctctccatcaaccccatcta

SEQ ID NO: 217 - DNA, 71 bp, artificial sequence
  Synthesized
  misc_feature (36)..(36): n=A/C
ccccatgaaacggcaaagctttcggctttcgccttnacctcgtatgcgttgccaagcctggcttggttaac

SEQ ID NO: 218 - DNA, 71 bp, artificial sequence
  Synthesized
  misc_feature (36)..(36): n=A/G
ttgctaggcatttctggtttcgtttgctcggtcagnttaatttgcagggattcagcccccaaccaggtgaa

SEQ ID NO: 219 - DNA, 71 bp, artificial sequence
  Synthesized
  misc_feature (36)..(36): n=A/G
gtggaaccaatcaaccctagccatgtagaacctaancatcagagtctttacagtaacccaaaattgggcgg

SEQ ID NO: 220 - DNA, 71 bp, artificial sequence
  Synthesized
  misc_feature (36)..(36): n=A/G
gaactaaggagctacagcaggggctgttaagaaaantatatccttagcccctgcaagttcccaaaaaatgc

SEQ ID NO: 221 - DNA, 71 bp, artificial sequence
  Synthesized
  misc_feature (36)..(36): n=A/G
atccccttgccacgctcgccatcgcggtgttcttgntctgccttcttctccccacttcgtcttcttcgtca

SEQ ID NO: 222 - DNA, 71 bp, artificial sequence
  Synthesized
  misc_feature (36)..(36): n=A/G
agaagttgagtgtgggagggggagggttgtggttcnatatgggagggatgttggaggaagacacatgaaga

SEQ ID NO: 223 - DNA, 71 bp, artificial sequence
  Synthesized
  misc_feature (36)..(36): n=A/G
atactcctcctgctagatgtgaacctgcaacggacngtgatagtagaacaagcgagagtgccgccgctctc

SEQ ID NO: 224 - DNA, 71 bp, artificial sequence
  Synthesized
  misc_feature (36)..(36): n=C/T
acacagcacaacagctgaccagacaaaccactgcgncattcaaaccagcgcctgccgattaaagaggccaa

SEQ ID NO: 225 - DNA, 71 bp, artificial sequence
  Synthesized
  misc_feature (36)..(36): n=A/G
tatccacatgagcagaataaaagagtcggggatttntatcttctacggttgtacctgaaaggtcaacgctc

SEQ ID NO: 226 - DNA, 71 bp, artificial sequence
  Synthesized
  misc_feature (36)..(36): n=C/T
agagactaatagtagacagacagtaatacagtatangtacatacatagagtcaactattaacagtaagaca

SEQ ID NO: 227 - DNA, 71 bp, artificial sequence
  Synthesized
  misc_feature (36)..(36): n=A/C
cgaaacactagttgaatgaggatccgatattctttntgaaagatgggctgggcacatttgaactgactgaa

SEQ ID NO: 228 - DNA, 71 bp, artificial sequence
  Synthesized
  misc_feature (36)..(36): n=A/G
tgagagctctgaagtagcagaagaacatatattatnggatcatctcatctgtacagatgtcaataatctgc

SEQ ID NO: 229 - DNA, 71 bp, artificial sequence
  Synthesized
  misc_feature (36)..(36): n=A/G
catgccagtgccctgatgggtttgagctcctcaacngtctaaatttctctagaggatgccggagaaaggaa

SEQ ID NO: 230 - DNA, 71 bp, artificial sequence
  Synthesized
  misc_feature (36)..(36): n=A/C
tgctagggaaacaccaaacagggaatgttcagaacnatctactatgcttgaatcctcccaacgaatttggg

SEQ ID NO: 231 - DNA, 71 bp, artificial sequence
  Synthesized
  misc_feature (36)..(36): n=A/G
ctctgaagaaaagggagaggaaagacaagaagaagnctgcagatgctgagaaggcaattgagaccgcaccc

SEQ ID NO: 232 - DNA, 71 bp, artificial sequence
  Synthesized
  misc_feature (36)..(36): n=A/G
ttgggaattttttcggagcaacgcgaaccaggcagnaccgcagagagcacgagtgaaaggagtgtagactt

SEQ ID NO: 233 - DNA, 71 bp, artificial sequence
  Synthesized
  misc_feature (36)..(36): n=C/T
aagaagctgagatccattataagcaaaaggtgtttntttctctgaggtttccatttttgggctctgtgcta

SEQ ID NO: 234 - DNA, 71 bp, artificial sequence
  Synthesized
  misc_feature (36)..(36): n=A/G
ctcggtctaaagtaagcatgtggcttcgttcccttngatctggttcaggacttttggtttgtttctttggg

SEQ ID NO: 235 - DNA, 71 bp, artificial sequence
  Synthesized
  misc_feature (36)..(36): n=C/T
tcatggcagatgctcccttccatagctttgagctcngtagacatgcacgctaaggtatccccaatgtgggt

SEQ ID NO: 236 - DNA, 71 bp, artificial sequence
  Synthesized
  misc_feature (36)..(36): n=A/G
tctttggaaggtgtattttcccttggaagagcaggnaatttgactgccgaatcgtctgccggaaaaagtgg

SEQ ID NO: 237 - DNA, 71 bp, artificial sequence
  Synthesized
  misc_feature (36)..(36): n=A/G
tatttctaggtgcgaaaactactggcaaggaccaangagaccgtttgcaccagattggatcataaagaaca

SEQ ID NO: 238 - DNA, 71 bp, artificial sequence
  Synthesized
  misc_feature (36)..(36): n=G/T
ctttcttctcgggagcgtccattggaatgtacggcngcggctcaaggagcattcacgaggaaatctatgta

SEQ ID NO: 239 - DNA, 71 bp, artificial sequence
  Synthesized
  misc_feature (36)..(36): n=A/C
cgacgacgacgacggccgtcgctattgccgtgggantcgctctgcactttcttccggccatagctagtagt

SEQ ID NO: 240 - DNA, 71 bp, artificial sequence
  Synthesized
  misc_feature (36)..(36): n=A/G
atatctcccttgtgtgtgtcgagtatgcgtgcctcntgctgaagttggatgccatttttttagaacataaa

SEQ ID NO: 241 - DNA, 71 bp, artificial sequence
  Synthesized
  misc_feature (36)..(36): n=A/G
agctttttttttaatggcgaatatgatcgagatatngtggcagccccatttggagagaagggggccctcca

SEQ ID NO: 242 - DNA, 71 bp, artificial sequence
  Synthesized
  misc_feature (36)..(36): n=A/G
gtagcagcagcagtacgtggattggctgttgatatntatacgacatggcatcctagatttaaaatgtctgg

SEQ ID NO: 243 - DNA, 71 bp, artificial sequence
  Synthesized
  misc_feature (36)..(36): n=A/C
gccaagatagtggtgccaaccaactcaccccgtcanccaaaaaaaatgcatgccaaattctagagagagta

SEQ ID NO: 244 - DNA, 71 bp, artificial sequence
  Synthesized
  misc_feature (36)..(36): n=C/T
cgtactccactattgctcccagcaactcccaagcgngcaagaagcaacaagtgagttatggtgtgaggcca

SEQ ID NO: 245 - DNA, 71 bp, artificial sequence
  Synthesized
  misc_feature (36)..(36): n=C/T
taacggaacggtacggatacagacgtgcaaacgganaagcctttgtttttgttatccggggcttccaatat

SEQ ID NO: 246 - DNA, 71 bp, artificial sequence
  Synthesized
  misc_feature (36)..(36): n=A/C
tggtaatcgtcaatggcaccttgacaaaacattttnttatcctccaggttcctttattcatgtttactaat

SEQ ID NO: 247 - DNA, 71 bp, artificial sequence
  Synthesized
  misc_feature (36)..(36): n=A/G
ctgtgacaaacgttgccttactggcatagggttacncagtatatattctgtagcaaaaagaaatatgttca

SEQ ID NO: 248 - DNA, 71 bp, artificial sequence
  Synthesized
  misc_feature (36)..(36): n=C/T
gaaacgaccgcactacgaggccacctaacaacggcngcagcggcactagagaacaaacgagcaatctgttt

SEQ ID NO: 249 - DNA, 71 bp, artificial sequence
  Synthesized
  misc_feature (36)..(36): n=A/G
ggggggagagagaagggagcatgaaacaggtaacancattctagattatccaacgatggtttagaattttg

SEQ ID NO: 250 - DNA, 71 bp, artificial sequence
  Synthesized
  misc_feature (36)..(36): n=A/G
accgcgcacgacgcgatacagtccagaagccatgtntgaggaatggctttgcagccagccgtggtcgccag

SEQ ID NO: 251 - DNA, 71 bp, artificial sequence
  Synthesized
  misc_feature (36)..(36): n=A/G
cttgacattacttgtttccttagaagaggtctctgnaaatttgggacattgttgttatgtgaatctctgtg

SEQ ID NO: 252 - DNA, 71 bp, artificial sequence
  Synthesized
  misc_feature (36)..(36): n=C/T
ctacaccagcctgaataaggcttatcccaaggactngtatccacttccacgcatagatcaaatcgtggact

SEQ ID NO: 253 - DNA, 71 bp, artificial sequence
  Synthesized
  misc_feature (36)..(36): n=A/G
tgacccatgcgtcaaaagttcatcataaaacgtggnacagctgtacgttcccgcgtgcaatggtggacatc

SEQ ID NO: 254 - DNA, 71 bp, artificial sequence
  Synthesized
  misc_feature (36)..(36): n=A/G
tgctaggaacgagagctttcctctaaggaagctagnaacgagagctttcctctctctttcttacacttttc

SEQ ID NO: 255 - DNA, 71 bp, artificial sequence
  Synthesized
  misc_feature (36)..(36): n=C/T
agtaggatacactaactggttgcaattattccagtntggtttcgcgtttatttttcactgtttgattgatg

SEQ ID NO: 256 - DNA, 71 bp, artificial sequence
  Synthesized
  misc_feature (36)..(36): n=C/T
atgactccttcgcctgtcgaagcaaactgaaaacgngaaacgctcgcgaagtcgcgataaaatgaacccct

SEQ ID NO: 257 - DNA, 71 bp, artificial sequence
  Synthesized
  misc_feature (36)..(36): n=C/T
gcaccgtcgaaacggcagtgaaattgcaaaagtacntgtaagcgagcctgatatctgactggcggtgttct

SEQ ID NO: 258 - DNA, 71 bp, artificial sequence
  Synthesized
  misc_feature (36)..(36): n=G/T
atcacgtaatctaaaacagagtgagaaataaaaaanataaagaagtaaagcacacaaccatcgaaccatgt

SEQ ID NO: 259 - DNA, 71 bp, artificial sequence
  Synthesized
  misc_feature (36)..(36): n=A/G
taggagtaagtactgtccgagctaaaccctcagatngtacgtagtacaaacaccaaaaactacacagttcc

SEQ ID NO: 260 - DNA, 71 bp, artificial sequence
  Synthesized
  misc_feature (36)..(36): n=A/G
gggaatccaatcagcgtgacaatctgcatggtggcntcctaccacactacccctgggttcaaaaaagagtc

SEQ ID NO: 261 - DNA, 71 bp, artificial sequence
  Synthesized
  misc_feature (36)..(36): n=G/T
accccgtgaccgtaccatacgttcacaacataactntcaatacaaatataacatacaatacacaagacatg

SEQ ID NO: 262 - DNA, 71 bp, artificial sequence
  Synthesized
  misc_feature (36)..(36): n=A/T
ttcagttgaaataatactgaggaacaagtcctccancaggtgccacatatttacacgatttactcttgacg

SEQ ID NO: 263 - DNA, 71 bp, artificial sequence
  Synthesized
  misc_feature (36)..(36): n=A/C
tgatagctgcgcgcctttgaaaacatcagttctaanagtagtgaaggagtttagggcaatataaacaactg

SEQ ID NO: 264 - DNA, 71 bp, artificial sequence
  Synthesized
  misc_feature (36)..(36): n=C/T
ccccaaacaaatcagatgtatggccaaaatgattcnataaaccaggataatggaatccagagtgagtatga

SEQ ID NO: 265 - DNA, 71 bp, artificial sequence
  Synthesized
  misc_feature (36)..(36): n=C/T
ctcgccagtcagttcgttacgcaattgcagactagngctttccactttcaagccaagctgctgtcctgtcc

SEQ ID NO: 266 - DNA, 71 bp, artificial sequence
  Synthesized
  misc_feature (36)..(36): n=C/T
agtgtggactcgcgagagcaagagttctccatatgnttgtttgttcatgcaatgctttgttttgtatgata

SEQ ID NO: 267 - DNA, 71 bp, artificial sequence
  Synthesized
  misc_feature (36)..(36): n=A/G
ggtacatcaagtttaatcagtctatcagaaagttcngttttgaggaaaacaaggaagatgattgcatttat

SEQ ID NO: 268 - DNA, 71 bp, artificial sequence
  Synthesized
  misc_feature (36)..(36): n=G/T
acagaagagaaaccaacataactgcacgcatttgtnttggcatgcttgtgttgtggaccataaaacttagt

SEQ ID NO: 269 - DNA, 71 bp, artificial sequence
  Synthesized
  misc_feature (36)..(36): n=C/T
gctacttttatatattaactagtacaatgctcgcangctaatcatattacaatcatatttgatgataaagt

SEQ ID NO: 270 - DNA, 71 bp, artificial sequence
  Synthesized
  misc_feature (36)..(36): n=C/T
gtagatttataaattagataggaggttgcctcaacngttcctctcttcgggtttcaactccaagtcttatg

SEQ ID NO: 271 - DNA, 71 bp, artificial sequence
  Synthesized
  misc_feature (36)..(36): n=A/G
atagctatttgcatagactacatgattcagtgagangtgtacttgagtggcggcgcatcagtcgccgccct

SEQ ID NO: 272 - DNA, 71 bp, artificial sequence
  Synthesized
  misc_feature (36)..(36): n=A/G
ttaaagatataagattatatataatgtagtaaaagntcatgtgcccataattctgttaggcttaggatcat

SEQ ID NO: 273 - DNA, 71 bp, artificial sequence
  Synthesized
  misc_feature (36)..(36): n=C/T
tcgatgctcttagatgcatatgacctaaaagtacgnaaaaacatagtgaaaaataaaaaaagactattgtt

SEQ ID NO: 274 - DNA, 71 bp, artificial sequence
  Synthesized
  misc_feature (36)..(36): n=C/G
caattacaatgcttttcatgaccccatttggttttnctttctgttttcaaacaactctgagatttggctca

SEQ ID NO: 275 - DNA, 71 bp, artificial sequence
  Synthesized
  misc_feature (36)..(36): n=A/G
ggcacactactagtaggtcaagttaagactccactntcaatttgcttgttaatggttgcatctttggagag

SEQ ID NO: 276 - DNA, 71 bp, artificial sequence
  Synthesized
  misc_feature (36)..(36): n=C/T
gcctacctgcgcgggcgattactggtgtacgtgtanacatatcccaatgggacgggcctgctgggtggcct

SEQ ID NO: 277 - DNA, 71 bp, artificial sequence
  Synthesized
  misc_feature (36)..(36): n=A/G
cgcacagtacttgtactagctgctatcaggtcaggnactctcaggactgaaaccacagtgcagggaaccca

SEQ ID NO: 278 - DNA, 71 bp, artificial sequence
  Synthesized
  misc_feature (36)..(36): n=A/C
ggatgtagctgcggcgacagcacggcccacgatttntcttccttcaccagtgactctgctgctgagctggt

SEQ ID NO: 279 - DNA, 71 bp, artificial sequence
  Synthesized
  misc_feature (36)..(36): n=A/G
tggtgacctgctaggcctaatgaaacccttagccancagatcgtccaattgtcgcttcaattccacctgct

SEQ ID NO: 280 - DNA, 71 bp, artificial sequence
  Synthesized
  misc_feature (36)..(36): n=C/T
cgccgttcgaagtcccaccgcagagggggttgtggnagcagggtctgtgttcagccaatcggtgcgaccta

SEQ ID NO: 281 - DNA, 71 bp, artificial sequence
  Synthesized
  misc_feature (36)..(36): n=A/G
tgtaaacatgctccagcgaggtgttccatctggtcntgcaataccacattccggattgtcaagatagtata

SEQ ID NO: 282 - DNA, 71 bp, artificial sequence
  Synthesized
  misc_feature (36)..(36): n=A/G
tattcagtgtaatgcccatcatattgaaacagcccngagtattctgccttgcaatgtgatatccttcccgt

SEQ ID NO: 283 - DNA, 71 bp, artificial sequence
  Synthesized
  misc_feature (36)..(36): n=G/T
tgcaatggatgaggaattgaggtagggaagaaaagntaacacctaggtctagtttgggaaccacaaaactg

SEQ ID NO: 284 - DNA, 71 bp, artificial sequence
  Synthesized
  misc_feature (36)..(36): n=G/T
acaaaagagaagctatacgggttgaattagctctcntgctattagcaggcttttttagagaagtactacat

SEQ ID NO: 285 - DNA, 71 bp, artificial sequence
  Synthesized
  misc_feature (36)..(36): n=C/T
ttcaagttctgcagcctctttagctttcttagcttnttccttagcccaatgagcttgagaaaaacgtaaga

SEQ ID NO: 286 - DNA, 71 bp, artificial sequence
  Synthesized
  misc_feature (36)..(36): n=A/G
acatggatgggaatgatattccaagatcctggaacncagacaaacttcagagatactatgtgtaatagcta

SEQ ID NO: 287 - DNA, 71 bp, artificial sequence
  Synthesized
  misc_feature (36)..(36): n=A/G
ctgctttgtatacgaagtccttcggcgccaaggttntctgcttcgatacacacattcacaacgctcgtacg

SEQ ID NO: 288 - DNA, 71 bp, artificial sequence
  Synthesized
  misc_feature (36)..(36): n=A/G
ctcctgcagcatagccttcgtatgagtcagtaccanctccagcttctaccgcagatcctggatccgagact

SEQ ID NO: 289 - DNA, 71 bp, artificial sequence
  Synthesized
  misc_feature (36)..(36): n=C/T
cgaccgtcaatggtggcagcggggtctcactctcgnctcgcctctctggtgctcaataatggcatccccgc

SEQ ID NO: 290 - DNA, 71 bp, artificial sequence
  Synthesized
  misc_feature (36)..(36): n=A/G
agcctatcaacaagtttacaccttgccctcatttcnaagcagcattaggtgggggcctcatcgcttgcact

SEQ ID NO: 291 - DNA, 71 bp, artificial sequence
  Synthesized
  misc_feature (36)..(36): n=A/G
ctgtctttgcccattctgctggcccaatggacgccnaagattggctacaaactgcggaacgtgagttgcac

SEQ ID NO: 292 - DNA, 71 bp, artificial sequence
  Synthesized
  misc_feature (36)..(36): n=G/T
tttaatgcgaaataaatccaagactcggatctactnttgagaggaccgcgggttgatttcaatgtttggcg

SEQ ID NO: 293 - DNA, 71 bp, artificial sequence
  Synthesized
  misc_feature (36)..(36): n=C/T
ttggctagcgcacaactcggcctgaacggtttcaanggcattgacgaattgctcggggaaatcccaagaat

SEQ ID NO: 294 - DNA, 71 bp, artificial sequence
  Synthesized
  misc_feature (36)..(36): n=C/T
tcgggacgacattctccaacaagcaaagaaagcggnccaccgattgccccatgctctccctcaacatctgg

SEQ ID NO: 295 - DNA, 71 bp, artificial sequence
  Synthesized
  misc_feature (36)..(36): n=C/T
aaagagggaaaagaaagacagaaagcaaggtcagtncctctaaattcacggcagcaacagagtgatcgtgc

SEQ ID NO: 296 - DNA, 71 bp, artificial sequence
  Synthesized
  misc_feature (36)..(36): n=A/G
tgaaacacgtaggctgtttcaaatttttgggaatcngatatcagcattctaatgcgggttaagattttttt

SEQ ID NO: 297 - DNA, 71 bp, artificial sequence
  Synthesized
  misc_feature (36)..(36): n=A/G
caccgcaaccatgctactgatcccacgtcgttgtcncttacacacgctaggttttttttctttttcctagt

SEQ ID NO: 298 - DNA, 71 bp, artificial sequence
  Synthesized
  misc_feature (36)..(36): n=C/T
aattcaaccacccctacgcgtaccaggaaagatagngaatggaattagatcatccggatgcaatttgttac

SEQ ID NO: 299 - DNA, 71 bp, artificial sequence
  Synthesized
  misc_feature (36)..(36): n=C/T
cgagtatgggctcgtaggtagtcgtggagtaagtangaaggaagtgcttgccattttcttgtgggcatacg

SEQ ID NO: 300 - DNA, 71 bp, artificial sequence
  Synthesized
  misc_feature (36)..(36): n=G/T
atagaggaggggtagcgccgtcgtgggtggaatcanggagcaccgccatttgagctcgaacccatggacag

SEQ ID NO: 301 - DNA, 71 bp, artificial sequence
  Synthesized
  misc_feature (36)..(36): n=C/G
gtccatggcggctctccctcggcgtacgcagaacantggctggctcttagcttccttgtgttctatagagg

SEQ ID NO: 302 - DNA, 71 bp, artificial sequence
  Synthesized
  misc_feature (36)..(36): n=A/G
ggccccacatgtatgcgagaacgtggttgaaagcgntcggaatgatgtggctggcatgtgggccctcgatg

SEQ ID NO: 303 - DNA, 71 bp, artificial sequence
  Synthesized
  misc_feature (36)..(36): n=A/G
caggattaggaaacgatttgttcttaccatactttncaaaagaagagaataattttcctttcaaatgtgcc

SEQ ID NO: 304 - DNA, 71 bp, artificial sequence
  Synthesized
  misc_feature (36)..(36): n=C/T
tcaatatctatctataacctattaaaacatggatgntagccttttagaacaacagttaaaagctatcaaat

SEQ ID NO: 305 - DNA, 71 bp, artificial sequence
  Synthesized
  misc_feature (36)..(36): n=C/T
agtacatgaaggattttatggtacttatcaattggncccaaagatgaagtggcttttgaggagagctggct

SEQ ID NO: 306 - DNA, 71 bp, artificial sequence
  Synthesized
  misc_feature (36)..(36): n=C/T
ttttcttctgcatctgatgcacgaagagataggaangataggaatgtgagcgatttatagaggtattagtt

SEQ ID NO: 307 - DNA, 71 bp, artificial sequence
  Synthesized
  misc_feature (36)..(36): n=A/G
caaccatggaagccgagcttgctgcacttgacacgncaaatgttgagacaaaatggttgcgtgaactcttg

SEQ ID NO: 308 - DNA, 71 bp, artificial sequence
  Synthesized
  misc_feature (36)..(36): n=C/T
aaatttacgagtgaagagtgtagagtatgctttccntatttcaaagccatttttgagaagaaaatccttaa

SEQ ID NO: 309 - DNA, 71 bp, artificial sequence
  Synthesized
  misc_feature (36)..(36): n=C/T
tccataagctttgcttattacaacaaaattcacccnagactagaggcaaggctaacaaagtagttcaacaa

SEQ ID NO: 310 - DNA, 71 bp, artificial sequence
  Synthesized
  misc_feature (36)..(36): n=G/T
cttgagcatagctgagtgttgtttcagatgtttttnagccaagaggcgtagactgtgacaacgacgatatt

SEQ ID NO: 311 - DNA, 71 bp, artificial sequence
  Synthesized
  misc_feature (36)..(36): n=C/T
cttctttggcccgctgccccttgtcagcactactcnaactacgctgcctgatgcacatgcaccaagtgagt

SEQ ID NO: 312 - DNA, 71 bp, artificial sequence
  Synthesized
  misc_feature (36)..(36): n=A/G
aagttcaattcagcatagtcatttttggaaacacanctatgagtgaaccaaactataatcagacaaactaa

SEQ ID NO: 313 - DNA, 71 bp, artificial sequence
  Synthesized
  misc_feature (36)..(36): n=C/T
ttcctcagcccagcccatgccgcccctttcgtcccngctcctgctccattttccgcgcatcgctttcagaa

SEQ ID NO: 314 - DNA, 71 bp, artificial sequence
  Synthesized
  misc_feature (36)..(36): n=C/T
gatccctatcagctcatcaacattctaggtgctttnctataggttatggattgtaaataagaagaaaaaac

SEQ ID NO: 315 - DNA, 71 bp, artificial sequence
  Synthesized
  misc_feature (36)..(36): n=A/C
cacattacttttgtctgaagctgggggttcacccanattcgtagcaaatatacaatgtccgattatgatgc

SEQ ID NO: 316 - DNA, 71 bp, artificial sequence
  Synthesized
  misc_feature (36)..(36): n=G/T
tcagtttccctaaaaacatggtgagtaaaattaaantcatgcttgtgttaaagtttggcaagaaattgagt

SEQ ID NO: 317 - DNA, 71 bp, artificial sequence
  Synthesized
  misc_feature (36)..(36): n=G/T
tgttaagaagttttgggcctacttcgggcacccaantccaaggtacccaacatatgtcgtattctaattta

SEQ ID NO: 318 - DNA, 71 bp, artificial sequence
  Synthesized
  misc_feature (36)..(36): n=G/T
gctactgtctccgccacctacgtcagcttgcccctncctcaacgtctatcagctgtcggcctccagtgcat

SEQ ID NO: 319 - DNA, 71 bp, artificial sequence
  Synthesized
  misc_feature (36)..(36): n=A/G
aagcccgtggcttacaaagcgtgcgcaggtgttcgncagaacgcttacacaaagcttgccccgacgtgggc

SEQ ID NO: 320 - DNA, 71 bp, artificial sequence
  Synthesized
  misc_feature (36)..(36): n=C/T
gtcgacttgtacttatgctggtgtgctgcgtagtanaggtacagcatcatccagcacgtcaggtcagtgtc

SEQ ID NO: 321 - DNA, 71 bp, artificial sequence
  Synthesized
  misc_feature (36)..(36): n=C/T
ttttttaaaaaatttcgagtgactgaagcactgganaaattagttgtgttcggttactgtgtaacatagat

SEQ ID NO: 322 - DNA, 71 bp, artificial sequence
  Synthesized
  misc_feature (36)..(36): n=A/G
acttcttattagctacccttttttagatgttagttnatttcatcttccataaaagtagttggcgatagtag

SEQ ID NO: 323 - DNA, 71 bp, artificial sequence
  Synthesized
  misc_feature (36)..(36): n=A/G
ttgtcattggcgaccacaattttcgacattagaaangaatgttttttttgctacatctcttccatagaagc

SEQ ID NO: 324 - DNA, 71 bp, artificial sequence
  Synthesized
  misc_feature (36)..(36): n=A/G
ctctattaatagctgcagctttacattaaatcaccngtatcaagccacctacccttcttgtatgaagacga

SEQ ID NO: 325 - DNA, 71 bp, artificial sequence
  Synthesized
  misc_feature (36)..(36): n=G/T
tttagtgatctcatatagtcttagggtggaaaaganatttgagcaaactataggatgaaatcctaacttgg

SEQ ID NO: 326 - DNA, 71 bp, artificial sequence
  Synthesized
  misc_feature (36)..(36): n=G/T
ttctatatatttatatattctacaacaacatagtgntattatatgtttatagtgtacaacaacagtaaggc

SEQ ID NO: 327 - DNA, 71 bp, artificial sequence
  Synthesized
  misc_feature (36)..(36): n=A/G
atctaattaatgaagaagcaagcctctagacgacgnccatgtcgctgggttcttcgctggcgccgttggcg

SEQ ID NO: 328 - DNA, 71 bp, artificial sequence
  Synthesized
  misc_feature (36)..(36): n=C/T
cgatagatgatgttgtcttaaaagctactttgaagngtacaacttcattattcgatatccctccctacata

SEQ ID NO: 329 - DNA, 71 bp, artificial sequence
  Synthesized
  misc_feature (36)..(36): n=A/G
tcaaactacatgattgatattaataaagcttgagcngctaaactatgcctggatgttgggtgggggcaggg

SEQ ID NO: 330 - DNA, 71 bp, artificial sequence
  Synthesized
  misc_feature (36)..(36): n=C/G
gttgcagaaacggtgggtggtgggtggatgcttgtngtagcggagaattggaagttgatgtccctccctca

SEQ ID NO: 331 - DNA, 71 bp, artificial sequence
  Synthesized
  misc_feature (36)..(36): n=A/G
agtagacgaggacagtaatgtggatgaggaggcacncccgtgtaggcgacgatagcatcatgagcctggtt

SEQ ID NO: 332 - DNA, 71 bp, artificial sequence
  Synthesized
  misc_feature (36)..(36): n=A/C
aaggagcaattgtctctatcaggcagactggctttnttcgccctttgctttttctgatagataaaagttgg

SEQ ID NO: 333 - DNA, 71 bp, artificial sequence
  Synthesized
  misc_feature (36)..(36): n=A/G
tatgtttcccataatcacatggcatttggaattccngttgtctaatcctcagctaccactcaggaacaccc

SEQ ID NO: 334 - DNA, 71 bp, artificial sequence
  Synthesized
  misc_feature (36)..(36): n=A/G
ttctttaaacgtgtcgtgttcaccttgtcgggtctnaaaaggcttgtattgggtcgaattgataagtctcg

SEQ ID NO: 335 - DNA, 71 bp, artificial sequence
  Synthesized
  misc_feature (36)..(36): n=A/G
tttctagattcatgtcgtagataaacaattagcagngttagcttttaaatgagttatgctcatacttaaaa

SEQ ID NO: 336 - DNA, 71 bp, artificial sequence
  Synthesized
  misc_feature (36)..(36): n=G/T
tcctttccgagttttcatcagtttattcaaaaggtngtaccattgtcatacaacatacatagtttgttcat

SEQ ID NO: 337 - DNA, 71 bp, artificial sequence
  Synthesized
  misc_feature (36)..(36): n=C/T
gtatagtgcgcacttatgcaacttagcacaagtagntcagagaaaactcaagaatcatgtggaagcaaccc

SEQ ID NO: 338 - DNA, 71 bp, artificial sequence
  Synthesized
  misc_feature (36)..(36): n=C/T
cacgacagcaatccgcggcacatgccgatcgacgcncgctgctccgttctacaaatacacctcaacccact

SEQ ID NO: 339 - DNA, 71 bp, artificial sequence
  Synthesized
  misc_feature (36)..(36): n=G/T
ttgcaaaacttatcggctgttcatcgatgtcccttngctgggtccagccctggtgcacacgatgcctggct

SEQ ID NO: 340 - DNA, 71 bp, artificial sequence
  Synthesized
  misc_feature (36)..(36): n=A/C
attgcggcattaaacaagggaaaggaaagggcggcngggtggatcagagcacaactcccgagggcagagct

SEQ ID NO: 341 - DNA, 71 bp, artificial sequence
  Synthesized
  misc_feature (36)..(36): n=C/T
ccctcgtcttgctcgtcggcgtcgccgatgccctgnccggtgaaccttccatcatcacttccgccactgct

SEQ ID NO: 342 - DNA, 71 bp, artificial sequence
  Synthesized
  misc_feature (36)..(36): n=A/G
tccaccaacaaccagccacaattcattcagatttcnaacagaacaattgtctagacttactatttagaaac

SEQ ID NO: 343 - DNA, 71 bp, artificial sequence
  Synthesized
  misc_feature (36)..(36): n=C/T
accccctttttcttactgccatgtgcaccctaaganccctctttgtttttaaccagcagtccagcaggcct

SEQ ID NO: 344 - DNA, 71 bp, artificial sequence
  Synthesized
  misc_feature (36)..(36): n=A/G
aaacaagtttcttgcaaaagaagccctagttcgcgncctatcttttggggtttattgatctggtggaggaa

SEQ ID NO: 345 - DNA, 71 bp, artificial sequence
  Synthesized
  misc_feature (36)..(36): n=A/G
atgctacagttgtacataagtctgcatgaccgtttnaactttgaaggtttcactaatatgcatggtagcta

SEQ ID NO: 346 - DNA, 71 bp, artificial sequence
  Synthesized
  misc_feature (36)..(36): n=A/G
agagagcttggcaaaccaacgagccttggctctcanccgtaggcgtcacttgaccctgtccctttcctgac

SEQ ID NO: 347 - DNA, 71 bp, artificial sequence
  Synthesized
  misc_feature (36)..(36): n=C/T
ttgaacatttttggatttcaaacgattcaagaaggntagttggtgtggcgcatacgtggaccaatcagaat

SEQ ID NO: 348 - DNA, 71 bp, artificial sequence
  Synthesized
  misc_feature (36)..(36): n=A/G
gattcatgggacgaagtaatgacactagaggacacnaaaggtatggagttttcgtatcctgcagtgatcca

SEQ ID NO: 349 - DNA, 71 bp, artificial sequence
  Synthesized
  misc_feature (36)..(36): n=C/T
tgagccatatagtgttatgttatcagtcttctatgntgggatcttgataaggctggtgagtaacttgttgc

SEQ ID NO: 350 - DNA, 71 bp, artificial sequence
  Synthesized
  misc_feature (36)..(36): n=A/G
cgggtctaaatgtctaatgactcgtgttattcaacnatttaggattaaattttagagtgtaatcgacactc

SEQ ID NO: 351 - DNA, 71 bp, artificial sequence
  Synthesized
  misc_feature (36)..(36): n=C/T
ctcgatggtgaaagcattacgaagaggcagtactantgtcaatgtattacagttgattgcaatgtttattc

SEQ ID NO: 352 - DNA, 71 bp, artificial sequence
  Synthesized
  misc_feature (36)..(36): n=C/T
tttaaacgaacaagaatgttgccagggtgcatatcngcatgaataaaattgtcctcctacagaatcgggag

SEQ ID NO: 353 - DNA, 71 bp, artificial sequence
  Synthesized
  misc_feature (36)..(36): n=C/T
tggaagacgttggtgtggacacgccggagccgacgntgttgtggttgttaccgctgctcgtcaccgtgctg

SEQ ID NO: 354 - DNA, 71 bp, artificial sequence
  Synthesized
  misc_feature (36)..(36): n=G/T
aaatctctgattattttcatgtctttttgctgcttngatatgttccgtcatcttcttcttcttttttgaaa

SEQ ID NO: 355 - DNA, 71 bp, artificial sequence
  Synthesized
  misc_feature (36)..(36): n=A/G
ctcccatcagatattgtgacggtagggttgagggtngtggacatcgaggggcagaagagaagatcagtcga

SEQ ID NO: 356 - DNA, 71 bp, artificial sequence
  Synthesized
  misc_feature (36)..(36): n=A/G
gaccgcgcgcttcgcgactctggtttcctcctcgtnttccactgtcttacgggacccacatcactctagac

SEQ ID NO: 357 - DNA, 71 bp, artificial sequence
  Synthesized
  misc_feature (36)..(36): n=A/G
ttcactcttcgagcaccactaattaacgaaaatcgnttctttaatatagtcaaatctacttcccaaatgcc

SEQ ID NO: 358 - DNA, 71 bp, artificial sequence
  Synthesized
  misc_feature (36)..(36): n=A/G
tgatagctagcctaggtgaaaatttagctggacganccagcgttaggatgattcattagaagttactcggt

SEQ ID NO: 359 - DNA, 71 bp, artificial sequence
  Synthesized
  misc_feature (36)..(36): n=A/G
tctcggcccatcttacaacatggaatgggcctgctncaattcggatagttgacgagtccaaaacaaacatg

SEQ ID NO: 360 - DNA, 71 bp, artificial sequence
  Synthesized
  misc_feature (36)..(36): n=A/G
cacaacagctatacgcatagagacatcgccacgtcnttggaatttatgtaatccgtctgatggaggatcgt

SEQ ID NO: 361 - DNA, 71 bp, artificial sequence
  Synthesized
  misc_feature (36)..(36): n=C/T
gcggcgacatctccggttggtgcccgctccttaccncctgttcatgttaacagtattcggttcagttggtt

SEQ ID NO: 362 - DNA, 71 bp, artificial sequence
  Synthesized
  misc_feature (36)..(36): n=A/G
acttattctattggtgtttcgtttgacctcaatttncaaaagatggctcataattgggtatgttagtatct

SEQ ID NO: 363 - DNA, 71 bp, artificial sequence
  Synthesized
  misc_feature (36)..(36): n=A/G
gctctccattgtagaatcaggtcctgcaacaatcgnggcagccacaaacactggatcgtagccgtacaaag

SEQ ID NO: 364 - DNA, 71 bp, artificial sequence
  Synthesized
  misc_feature (36)..(36): n=A/G
tgttagtagtgtggttggaggcgctggagtcgaccncccagtcggtaaccacatcgggtggattcaaagcc

SEQ ID NO: 365 - DNA, 71 bp, artificial sequence
  Synthesized
  misc_feature (36)..(36): n=C/T
aagtggatattgcatgcaacaaatatataactctanccaagcctcagtaattgcacttcttatcacagaag

SEQ ID NO: 366 - DNA, 71 bp, artificial sequence
  Synthesized
  misc_feature (36)..(36): n=C/T
gaatggcaatggctggaattcccgaggcgactctcnttccgcttccaatacctgtgtcaagcggtttaaag

SEQ ID NO: 367 - DNA, 71 bp, artificial sequence
  Synthesized
  misc_feature (36)..(36): n=G/T
agcaacttgatttagttttaagcagttcaataaaanaagttcacaactaaagacaacactaggcatatagt

SEQ ID NO: 368 - DNA, 71 bp, artificial sequence
  Synthesized
  misc_feature (36)..(36): n=C/T
ttttccaattggtgctagtcctagcttatcatatanatatcatgcgttccgaacttgataccttcttatat

SEQ ID NO: 369 - DNA, 71 bp, artificial sequence
  Synthesized
  misc_feature (36)..(36): n=G/T
tgttgctttgttactgcctttgtttgaaactactcnggataaagtcatggaaatgtttgtatcaacgtgcc

SEQ ID NO: 370 - DNA, 71 bp, artificial sequence
  Synthesized
  misc_feature (36)..(36): n=A/G
ttccttcatgtgtctgcctgcctctcccgggtcccngcccgataaggacggcggagccttcatgcgtctga

SEQ ID NO: 371 - DNA, 71 bp, artificial sequence
  Synthesized
  misc_feature (36)..(36): n=C/T
tccttcaggtgatccatcattaaatgacagagaatnccttgtctgagtttgacattgttgtacttttttga

SEQ ID NO: 372 - DNA, 71 bp, artificial sequence
  Synthesized
  misc_feature (36)..(36): n=G/T
gtctctggtctgttgatctggaatccaacggtggantgtgctaccggttcggtctctaatctgagtcgtgg

SEQ ID NO: 373 - DNA, 71 bp, artificial sequence
  Synthesized
  misc_feature (36)..(36): n=C/T
atatttggacataggaggaaaatttgggtttctacnagaagcaccaggccggtccaagggcacatcggact

SEQ ID NO: 374 - DNA, 71 bp, artificial sequence
  Synthesized
  misc_feature (36)..(36): n=C/T
ttctgtaatagtttagcaatgctcgtttctaaggtntaggaaatccatgtcaatttatttttaaggtctta

SEQ ID NO: 375 - DNA, 71 bp, artificial sequence
  Synthesized
  misc_feature (36)..(36): n=C/T
taaaggagggcccatccttgctttcctttcagcagngatgaggaggcgatggccacatacatacctcttgt

SEQ ID NO: 376 - DNA, 71 bp, artificial sequence
  Synthesized
  misc_feature (36)..(36): n=C/T
acatatcacataaagaacaactagctctttgattgngttatattgataaacttggaaggccatgtgagcac

SEQ ID NO: 377 - DNA, 71 bp, artificial sequence
  Synthesized
  misc_feature (36)..(36): n=A/G
aaatgcaggcttgctttattggagatccaggacttnttgctattggggaaggatgcaagctgcttaggaaa

SEQ ID NO: 378 - DNA, 71 bp, artificial sequence
  Synthesized
  misc_feature (36)..(36): n=G/T
ggtttccggttgatctcatgcatccacagatacctngcatcgccagacatgagcgcaagggagcccgggtt

SEQ ID NO: 379 - DNA, 71 bp, artificial sequence
  Synthesized
  misc_feature (36)..(36): n=A/G
tcatcggggttgatgctgttgcaaagctccttcccntcaaagagctcctgaagaagctgctggatctttgg

SEQ ID NO: 380 - DNA, 71 bp, artificial sequence
  Synthesized
  misc_feature (36)..(36): n=A/G
gcccagaacgactcagcattgggagatttggctgancactcacagttcgggagcagcaattccctaccaga

SEQ ID NO: 381 - DNA, 71 bp, artificial sequence
  Synthesized
  misc_feature (36)..(36): n=A/G
accacagtgatagaaatcaacgctgaagtctacgtncgtccagggaccgtccacacatgaaatgaaaggaa

SEQ ID NO: 382 - DNA, 71 bp, artificial sequence
  Synthesized
  misc_feature (36)..(36): n=C/T
ctcacaaatctcgaccagaacaaagaaacatgaccnggatcaagctagaggattactcgccaacaagtcaa

SEQ ID NO: 383 - DNA, 71 bp, artificial sequence
  Synthesized
  misc_feature (36)..(36): n=A/G
atttttttaatcatcatcgtcgtggaagcttatctnttcgcttcggattcaagtcgggtgtttgaactggt

SEQ ID NO: 384 - DNA, 71 bp, artificial sequence
  Synthesized
  misc_feature (36)..(36): n=A/G
aatgcgtcataacttggccaatcatacttcagatantaatactagatgaaattgagagctgtattacctta

SEQ ID NO: 385 - DNA, 71 bp, artificial sequence
  Synthesized
  misc_feature (36)..(36): n=A/G
tgttttattatgaccatatgatgtttatccttttantttttatcttttagcataatagcatgttaaggtcc

SEQ ID NO: 386 - DNA, 71 bp, artificial sequence
  Synthesized
  misc_feature (36)..(36): n=A/G
tccttactatgttgcccctgaggttctgaaaaaacnctatggctgtgaggttgatgtgtggagtgccggtg

SEQ ID NO: 387 - DNA, 71 bp, artificial sequence
  Synthesized
  misc_feature (36)..(36): n=A/G
gcagctcaatacctgctcacagaaaagttttggtcntctgcaggtatcatcgccaggcgcagagaggcttc

SEQ ID NO: 388 - DNA, 71 bp, artificial sequence
  Synthesized
  misc_feature (36)..(36): n=A/G
cccggtcagtggtgtaaaagcacttctggtcgtctnccaccacgagacaacaacaacagcaacaacaaaaa

SEQ ID NO: 389 - DNA, 71 bp, artificial sequence
  Synthesized
  misc_feature (36)..(36): n=A/C
atggattcaacagtaattatgatagatggtaacaanaaacgttggccaccccttaaattttaaacatatgt

SEQ ID NO: 390 - DNA, 71 bp, artificial sequence
  Synthesized
  misc_feature (36)..(36): n=C/T
cccacaatatttaaagccaaccacatgtcaagatgncctagctatttactttgtaggccaggagtccaggg

SEQ ID NO: 391 - DNA, 71 bp, artificial sequence
  Synthesized
  misc_feature (36)..(36): n=G/T
agatggtaactagcgtgtggacttgggctcgtgcgnaaagtggggcccggcaaaggcccactcccccgtct

SEQ ID NO: 392 - DNA, 71 bp, artificial sequence
  Synthesized
  misc_feature (36)..(36): n=A/G
attattttgatgctatagttgcttgtatttttttcnataaggttgaagaaatattatcacaaaatggcaaa

SEQ ID NO: 393 - DNA, 71 bp, artificial sequence
  Synthesized
  misc_feature (36)..(36): n=A/C
ccatccttcgtgtacccacagccacccaatcgcacngcctaaagcaaaacacgtttaatgacggcgtagat

SEQ ID NO: 394 - DNA, 71 bp, artificial sequence
  Synthesized
  misc_feature (36)..(36): n=C/T
ggacttgaaggagctacgcttgcgcttctgattagnctcagacgcaagtgctcttgtagtcttcacttctc

SEQ ID NO: 395 - DNA, 71 bp, artificial sequence
  Synthesized
  misc_feature (36)..(36): n=C/T
ttaaaaaaaacatggttaaaattcgaagtaaaatgnaaaaagtttatagattgtactgataaggcatcaaa

SEQ ID NO: 396 - DNA, 71 bp, artificial sequence
  Synthesized
  misc_feature (36)..(36): n=C/T
tcttcacgcaaagtgcaaaaactttaaccctaaggnaacatgaacaggttgtgtgtgtgctgaagaaagag

SEQ ID NO: 397 - DNA, 71 bp, artificial sequence
  Synthesized
  misc_feature (36)..(36): n=A/C
cccctgtcgaaaacagagatttccacgtcagcctcnagcaaaatgaagtggttttccttctataattacgt

SEQ ID NO: 398 - DNA, 71 bp, artificial sequence
  Synthesized
  misc_feature (36)..(36): n=A/G
cacattaacttagcctatagcggcgactgaggtgcngcttggttaggaagccagttttagttttcttttgg

SEQ ID NO: 399 - DNA, 71 bp, artificial sequence
  Synthesized
  misc_feature (36)..(36): n=A/G
gtctatagttattttccttttgtcatgaactaatgnattgtgaggcattagataatctagttgtattggag

SEQ ID NO: 400 - DNA, 71 bp, artificial sequence
  Synthesized
  misc_feature (36)..(36): n=A/G
ggacatccttacaagaggacccaacaaggactaagnaaagcacaaactttttgacaccgcaacaaaaatct

SEQ ID NO: 401 - DNA, 71 bp, artificial sequence
  Synthesized
  misc_feature (36)..(36): n=A/G
tgacaatacctatgagtaagtcaatactgtaaagcnataatttttcaaaagcagtaatatagtatttcgtg

SEQ ID NO: 402 - DNA, 71 bp, artificial sequence
  Synthesized
  misc_feature (36)..(36): n=G/T
tagaatattggagtgagaacaaaaaggttgttttgntttacaagaacgtgtcatgtttctactcgaaaacc

SEQ ID NO: 403 - DNA, 71 bp, artificial sequence
  Synthesized
  misc_feature (36)..(36): n=C/G
agctcttgcttgtagaactcacgcttgtcaattgangcgtgatagatctcgacctggacagaagctcagtt

SEQ ID NO: 404 - DNA, 71 bp, artificial sequence
  Synthesized
  misc_feature (36)..(36): n=C/T
  misc_feature (36)..(36): n=C/T
agagttatatccttgtatggattgtggatcctaccnattagagatcctaatactcctatcttgttatagtt

SEQ ID NO: 405 - DNA, 71 bp, artificial sequence
  Synthesized
  misc_feature (36)..(36): n=A/C
gatggactgtaaatttgttcgtcactcttgctgttnttttcgttcagctgcatgcacatgagctcattgca

SEQ ID NO: 406 - DNA, 71 bp, artificial sequence
  Synthesized
  misc_feature (36)..(36): n=C/T
agatctttgtccgtggtaacatttaatactccatgntgtacatttaatactagatcactaggcccacctgt

SEQ ID NO: 407 - DNA, 71 bp, artificial sequence
  Synthesized
  misc_feature (36)..(36): n=G/T
tgcctgcttgctacggtttcagaatgctttctttgncatttcgtagcagaaaacagtgcgccacctgagcg

SEQ ID NO: 408 - DNA, 71 bp, artificial sequence
  Synthesized
  misc_feature (36)..(36): n=A/G
agaagtagcgagcatccaaggagtacgagaaggtgnatctgtgtgaggagattcagagctgcttccatggt

SEQ ID NO: 409 - DNA, 71 bp, artificial sequence
  Synthesized
  misc_feature (36)..(36): n=C/T
actagattctacaggggatgtcgaaaacttgaacangttccggcatccatcacgcaaaccagtccaccgat

SEQ ID NO: 410 - DNA, 71 bp, artificial sequence
  Synthesized
  misc_feature (36)..(36): n=C/T
ataagtagtaagagcacatacggtattacaccatgntggcctaaacttgtgcctaggttcaatacgatggt

SEQ ID NO: 411 - DNA, 71 bp, artificial sequence
  Synthesized
  misc_feature (36)..(36): n=A/G
atttaatcagaagttcgcagcgtgtcatttgaaagntaaactggcatggactgtgcatgaccgaagctgtt

SEQ ID NO: 412 - DNA, 71 bp, artificial sequence
  Synthesized
  misc_feature (36)..(36): n=C/T
gtcgacgtgccatcggttcgggagagcagcatcttngtagtctatgccccccgtgtccctgcacggggtag

SEQ ID NO: 413 - DNA, 71 bp, artificial sequence
  Synthesized
  misc_feature (36)..(36): n=A/G
tcaattgtacgcatggaaatgaaatatggtatcatncaggtttggggagtggtatttgttagcaactcata

SEQ ID NO: 414 - DNA, 71 bp, artificial sequence
  Synthesized
  misc_feature (36)..(36): n=C/T
ttgcatctctgtatcgagtatcaacaaagagctaanagccaccagcccattacatctttaatttctgaacg

SEQ ID NO: 415 - DNA, 71 bp, artificial sequence
  Synthesized
  misc_feature (36)..(36): n=A/G
gaggagagagaaagggacggctgttcgcagagcacncagatgaactgatagagaactttcaggttttccac

SEQ ID NO: 416 - DNA, 71 bp, artificial sequence
  Synthesized
  misc_feature (36)..(36): n=A/G
acaatctactttgcatggcatgtactgtacgttttngccaccttcttgttgctcagagttgacttgaccta

SEQ ID NO: 417 - DNA, 71 bp, artificial sequence
  Synthesized
  misc_feature (36)..(36): n=C/G
ctgcaggaaataagcaaagaacaaaaaaaatgtgtnatcatccctactgaaaatgtcagatggtctcgcct

SEQ ID NO: 418 - DNA, 71 bp, artificial sequence
  Synthesized
  misc_feature (36)..(36): n=A/G
agagttacgcactcagaaaagaacatgccatatgcnacatttccacaagcatgcatgacactaccgcaaaa

SEQ ID NO: 419 - DNA, 71 bp, artificial sequence
  Synthesized
  misc_feature (36)..(36): n=A/G
tccatgggatgggatcaatacaaaatcactgaactnatcgattgcttgagactgtactgtctgcatattcc

SEQ ID NO: 420 - DNA, 71 bp, artificial sequence
  Synthesized
  misc_feature (36)..(36): n=A/G
gagaccaatgaagcatcagacaaatttgggtccctnatctctattttccaaatcataatgacagattcctt

SEQ ID NO: 421 - DNA, 71 bp, artificial sequence
  Synthesized
  misc_feature (36)..(36): n=G/T
atgcatatcattcacagtcacagcgcgctctatatntctctgctctctctaccagtgcagcgcatggcaga

SEQ ID NO: 422 - DNA, 71 bp, artificial sequence
  Synthesized
  misc_feature (36)..(36): n=C/G
tggtatgtcatttgtataaaaaatgaagctattacnctgcataaatatgcatttcacttattatgggcatg

SEQ ID NO: 423 - DNA, 71 bp, artificial sequence
  Synthesized
  misc_feature (36)..(36): n=A/G
aatgacgaagctgtttctctctcccttcgtttaccnaagctttcagtcgacgcttgcctttgttcctgaaa

SEQ ID NO: 424 - DNA, 71 bp, artificial sequence
  Synthesized
  misc_feature (36)..(36): n=A/G
gtgctgcttcgttccaacgaaaacgcaacatgaaancaatgcaactttcaccaggatgttttatcatttcc

SEQ ID NO: 425 - DNA, 71 bp, artificial sequence
  Synthesized
  misc_feature (36)..(36): n=C/T
agcaacgtgtggttagcaacacaattttgcccttancacatctcaacaaaaccccaaatacacatagttac

SEQ ID NO: 426 - DNA, 71 bp, artificial sequence
  Synthesized
  misc_feature (36)..(36): n=A/G
ccccttacatatgcttcaaattggcaaatgggaagntcacccgcagttcctggatcatatatagcaggctc

SEQ ID NO: 427 - DNA, 71 bp, artificial sequence
  Synthesized
  misc_feature (36)..(36): n=C/T
cagattagcgcatgccataactgctgtgacagtaanagtctcgtgacacgtaactagctagtactattacc

SEQ ID NO: 428 - DNA, 71 bp, artificial sequence
  Synthesized
  misc_feature (36)..(36): n=A/G
tgagcatgatgtcggcgacgtagaggaggtagacgntgttgttgctgtgccgaaggatgagcagggacatg

SEQ ID NO: 429 - DNA, 71 bp, artificial sequence
  Synthesized
  misc_feature (36)..(36): n=A/G
taattccgcctaatcaagccacatgtcccagataangtactgtcggcgtttcgagaccgggggtccctggg

SEQ ID NO: 430 - DNA, 71 bp, artificial sequence
  Synthesized
  misc_feature (36)..(36): n=A/G
gagacacggaatcatgaagcaaatattaggcgatanatataaaagcatattacaccgtatcggaggaacga

SEQ ID NO: 431 - DNA, 71 bp, artificial sequence
  Synthesized
  misc_feature (36)..(36): n=C/T
ctaatctacgccttgttcaccctttgctcctcctancaaaactcccaactccaaccaattagcaaaaacaa

SEQ ID NO: 432 - DNA, 71 bp, artificial sequence
  Synthesized
  misc_feature (36)..(36): n=A/C
tggagcccatcagcttagatatgaatccatgcaacngtgcatcttatacaggttaataatggaactctagg

SEQ ID NO: 433 - DNA, 71 bp, artificial sequence
  Synthesized
  misc_feature (36)..(36): n=C/T
tttacagttccattaacttttttatacttgattttngcaaatacaacatcattatagagataacaatcatt

SEQ ID NO: 434 - DNA, 71 bp, artificial sequence
  Synthesized
  misc_feature (36)..(36): n=C/T
gcaaatcatctccagcggcactctcctcgcctcccnagatctcggttctccatcaagatgtgatgacttgc

SEQ ID NO: 435 - DNA, 71 bp, artificial sequence
  Synthesized
  misc_feature (36)..(36): n=A/G
actaaatgtacaaaactacaaacgtcattgatacanacaataaacactactattcttgggattcatgcgcc

SEQ ID NO: 436 - DNA, 71 bp, artificial sequence
  Synthesized
  misc_feature (36)..(36): n=C/T
cacttaagcaaggattcacctctctgacttgaatcntacaagcttctcatacaacttgaactattagagga

SEQ ID NO: 437 - DNA, 71 bp, artificial sequence
  Synthesized
  misc_feature (36)..(36): n=A/G
aggcttaatccgtggcttaaatagcggatgagaggntgagctgagcagatgtcgtgggagatgaaatgcaa

SEQ ID NO: 438 - DNA, 71 bp, artificial sequence
  Synthesized
  misc_feature (36)..(36): n=A/G
ctatagcctcataaacttgtccacatgctttaactnggatagctgtagggatggataattggatctcttca

SEQ ID NO: 439 - DNA, 71 bp, artificial sequence
  Synthesized
  misc_feature (36)..(36): n=A/G
caagctcacacagactgaatcacatactcaatacancttacacacagtggaggtagggtattacgctccgg

SEQ ID NO: 440 - DNA, 71 bp, artificial sequence
  Synthesized
  misc_feature (36)..(36): n=C/T
gatggaatcatttgttacaaacatcgtattgtgatngcagcttggtccgaatttcctcagaaaatttttcg

SEQ ID NO: 441 - DNA, 71 bp, artificial sequence
  Synthesized
  misc_feature (36)..(36): n=A/G
tcctaggtgttttcgtaagattcttgcgctggagtngtgctaatcatcatgctcagctctccaggtccagc

SEQ ID NO: 442 - DNA, 71 bp, artificial sequence
  Synthesized
  misc_feature (36)..(36): n=A/C
ctgacccacgctcagaatccatccatttctatcccncacacacaaatacacatcccccttcccttccccgc

SEQ ID NO: 443 - DNA, 71 bp, artificial sequence
  Synthesized
  misc_feature (36)..(36): n=A/C
ttctccaaatcgcccagtttttgtgtcttcactccntgtgtatgtatttattcacatttcatatacttatg

SEQ ID NO: 444 - DNA, 71 bp, artificial sequence
  Synthesized
  misc_feature (36)..(36): n=C/T
ttctctcctcgtttactgtgtcatcgcaacccactnccaccgactatgttgctaactcttcctcatacccc

SEQ ID NO: 445 - DNA, 71 bp, artificial sequence
  Synthesized
  misc_feature (36)..(36): n=C/T
gcccatgcgcgtgacaatggcggaggagctggcgcnggtggggtccgcctgtaattcatggaaaaggctgc

SEQ ID NO: 446 - DNA, 71 bp, artificial sequence
  Synthesized
  misc_feature (36)..(36): n=A/G
gttcccttgactccgagactattggattcaggacgnacgacatcatcgaggcggcagctttgaagacccta

SEQ ID NO: 447 - DNA, 71 bp, artificial sequence
  Synthesized
  misc_feature (36)..(36): n=A/C
attggaaacattaactgaattttagtgttgatagcngttttggagctgatttgtggctgttctataatgtt

SEQ ID NO: 448 - DNA, 71 bp, artificial sequence
  Synthesized
  misc_feature (36)..(36): n=C/T
ttaaggctttctacactttgaattgctgagaggcangagaatgaacatacactccgatccgtgttataaga

SEQ ID NO: 449 - DNA, 71 bp, artificial sequence
  Synthesized
  misc_feature (36)..(36): n=C/T
gtctagatgactcaattgaataaggttccattccancgcctagaccgtggtggtgacgaagaatgacgtct

SEQ ID NO: 450 - DNA, 71 bp, artificial sequence
  Synthesized
  misc_feature (36)..(36): n=A/G
aaaagtggacccacgctcaatgtgtgatgaccatcncaaacggggttagtccctaaactgcgcaaacatca

SEQ ID NO: 451 - DNA, 71 bp, artificial sequence
  Synthesized
  misc_feature (36)..(36): n=G/T
cccttcctgacgtctctagtgatcctctttctaaancccctcagccacccaaaaagaaagcctcctcccac

SEQ ID NO: 452 - DNA, 71 bp, artificial sequence
  Synthesized
  misc_feature (36)..(36): n=G/T
acagtttatgaagatgaagtaagaactgatcaattngaaaaaaaagatcgaagcaattcaaaaacaactaa

SEQ ID NO: 453 - DNA, 71 bp, artificial sequence
  Synthesized
  misc_feature (36)..(36): n=C/T
taccacaggttgtttggccgaagttggagctgtgangactcatagagcaaagaagatcagtttttctcagg

SEQ ID NO: 454 - DNA, 71 bp, artificial sequence
  Synthesized
  misc_feature (36)..(36): n=A/G
tgcctatgtcctaaactacttatatttgcaatcagngggagtatttaaacatgtgtttggtttcggaacga

SEQ ID NO: 455 - DNA, 71 bp, artificial sequence
  Synthesized
  misc_feature (36)..(36): n=C/T
ttttatcattttaaatcccaaaatttgatacctganagaggtacatcttgtccgatgttgaacccatcacg

SEQ ID NO: 456 - DNA, 71 bp, artificial sequence
  Synthesized
  misc_feature (36)..(36): n=C/T
atcaaaaccagcagcaaatcttcggccacggccgcnaccacggccaccacaatggtgatcatcatcctcat

SEQ ID NO: 457 - DNA, 71 bp, artificial sequence
  Synthesized
  misc_feature (36)..(36): n=A/G
ggactccgctcctacaccatggtcacgttagaaacncagactttgtaataaaaaaaactcactagcaggac

SEQ ID NO: 458 - DNA, 71 bp, artificial sequence
  Synthesized
  misc_feature (36)..(36): n=A/G
ctcgatcgaccaagtatgttggtctaaggcccgacncagcaaggtgtcgagagcatcatggaaatgacaac

SEQ ID NO: 459 - DNA, 71 bp, artificial sequence
  Synthesized
  misc_feature (36)..(36): n=G/T
gcttactttacagttgataactagatggaccttctnccgcccaatgtgctaatttgatatgttcttgtttc

SEQ ID NO: 460 - DNA, 71 bp, artificial sequence
  Synthesized
  misc_feature (36)..(36): n=C/T
atgatacaaacctgaaaagtttcgcataaatacccncctcgtaagataaaactttatgagctattgttggg

SEQ ID NO: 461 - DNA, 71 bp, artificial sequence
  Synthesized
  misc_feature (36)..(36): n=C/T
ctttgttgttgacagagaggtagcatcaacagcacnaactctaactctctgagaagagaagtcccaagttc

SEQ ID NO: 462 - DNA, 71 bp, artificial sequence
  Synthesized
  misc_feature (36)..(36): n=C/T
tgggtttttgatgagctcaacaaccctgaaggcacnggatactactgaactaagatattcttgcatcaaat

SEQ ID NO: 463 - DNA, 71 bp, artificial sequence
  Synthesized
  misc_feature (36)..(36): n=C/G
cactcaaactagaagtgagttcaacttagaagccanacttgcttcaagacatgaagcaagtcaatggctga

SEQ ID NO: 464 - DNA, 71 bp, artificial sequence
  Synthesized
  misc_feature (36)..(36): n=A/G
acaaaaattctcgaagagtgatacaaattgaactanattgggaaaataaataggaaccgagcacatcgttt

SEQ ID NO: 465 - DNA, 71 bp, artificial sequence
  Synthesized
  misc_feature (36)..(36): n=C/T
aaaggcagggcgcaactggaggagcagataagaagnagcgcgcgcagggagcttcgaaggcggtgacttgg

SEQ ID NO: 466 - DNA, 71 bp, artificial sequence
  Synthesized
  misc_feature (36)..(36): n=C/T
tcgtccacgtgctttgcgaatttgggacggaagtgnacacgatggtgaacagatgagtcgccagaactcat

SEQ ID NO: 467 - DNA, 71 bp, artificial sequence
  Synthesized
  misc_feature (36)..(36): n=A/C
ttatgactaacacctaagtatttagaaagcaataantttataactgtaactccgaatttagtggttctcga

SEQ ID NO: 468 - DNA, 71 bp, artificial sequence
  Synthesized
  misc_feature (36)..(36): n=C/T
acttttttcagtgacaaatgttttaaagtcttaaanatcggatgtagctaaatgtacactattagcaacca

SEQ ID NO: 469 - DNA, 71 bp, artificial sequence
  Synthesized
  misc_feature (36)..(36): n=A/C
gagagagagatagatagatgtataaccccacacgcncacacagtagttctctgttctaccgtgccgtcacc

SEQ ID NO: 470 - DNA, 71 bp, artificial sequence
  Synthesized
  misc_feature (36)..(36): n=C/T
aatgaagactttattgatgacggatcctccaatcanagagtacaatgttgctccgatagcttttgaggcct

SEQ ID NO: 471 - DNA, 71 bp, artificial sequence
  Synthesized
  misc_feature (36)..(36): n=C/T
gtcatttacacttagcagcttggacaacaccttctncttgcgtcgccttcctatgtcaacgtaacgaagct

SEQ ID NO: 472 - DNA, 71 bp, artificial sequence
  Synthesized
  misc_feature (36)..(36): n=A/G
ggacgggtgggggaggttatgcgaaggcttatgtcncttaagagtgaaattcttgaccaggatattatgat

SEQ ID NO: 473 - DNA, 71 bp, artificial sequence
  Synthesized
  misc_feature (36)..(36): n=A/G
agggagtgaatatacagatccgacaaatactcaccntcttagcatcaagcggtatcacacggaagcctgag

SEQ ID NO: 474 - DNA, 71 bp, artificial sequence
  Synthesized
  misc_feature (36)..(36): n=A/C
agacagaaagatgattgcatagggagataccaagtnttccactctacttatctgtagagacatgccatgtt

SEQ ID NO: 475 - DNA, 71 bp, artificial sequence
  Synthesized
  misc_feature (36)..(36): n=G/T
taccccctatgtaatgagcttgacccaactaccctntctatattaatacactcccaaccctagttaggttt

SEQ ID NO: 476 - DNA, 71 bp, artificial sequence
  Synthesized
  misc_feature (36)..(36): n=A/G
ttccctcgtcgccacctcgccgaggctgcatgtctnctggtcaggtcctagctagggacaagaagggacgg

SEQ ID NO: 477 - DNA, 71 bp, artificial sequence
  Synthesized
  misc_feature (36)..(36): n=G/T
aaaatagaatagaattaaaacaaggggtgctgaganttatcacgcatcatgccatgatcgccagtgtgttc

SEQ ID NO: 478 - DNA, 71 bp, artificial sequence
  Synthesized
  misc_feature (36)..(36): n=C/G
ccaaactaattaatgacagctaaacaatgatgctantactatggctcctgccatggcctatactacaaaaa

SEQ ID NO: 479 - DNA, 71 bp, artificial sequence
  Synthesized
  misc_feature (36)..(36): n=C/T
accacatagaaacactgatggctactatatgatgangaacacaccgatggtcatctttcagagtatcgcac

SEQ ID NO: 480 - DNA, 71 bp, artificial sequence
  Synthesized
  misc_feature (36)..(36): n=A/G
aattatcatcgatggaacgcaaacaaggagagcacnagaagacatctgagttcctgcaatctaaattggat

SEQ ID NO: 481 - DNA, 71 bp, artificial sequence
  Synthesized
  misc_feature (36)..(36): n=A/C
agatcgaggccgccaattgcacgccatcgggtatgngttgggaatgaatgtcgccgctgtttttcggccag

SEQ ID NO: 482 - DNA, 71 bp, artificial sequence
  Synthesized
  misc_feature (36)..(36): n=A/T
cataattatttcttgaatttagtttttttgtggtanttttccttcacctcttcccctcacgatatcttttg

SEQ ID NO: 483 - DNA, 71 bp, artificial sequence
  Synthesized
  misc_feature (36)..(36): n=A/G
aagttggaagaatacgaaaggaatcaagcactcagncaaccgaactggaagcaaggaaagaggatcgacga

SEQ ID NO: 484 - DNA, 71 bp, artificial sequence
  Synthesized
  misc_feature (36)..(36): n=C/T
ggctgcctaatcccaaaacaatgggctagaatctcntctttcatcgactaaaaatactaaagtgtcattat

SEQ ID NO: 485 - DNA, 71 bp, artificial sequence
  Synthesized
  misc_feature (36)..(36): n=A/G
agcgttacggcatcgtctacgtggaccgtagcaacngctgcaagcgccgcatgaagcgctcggccaaatgg

SEQ ID NO: 486 - DNA, 71 bp, artificial sequence
  Synthesized
  misc_feature (36)..(36): n=C/T
gatactaattggtcgaagttggtatcaaacggttcnccagagcgcgagtcagaacaagccaaccgatcaac

SEQ ID NO: 487 - DNA, 71 bp, artificial sequence
  Synthesized
  misc_feature (36)..(36): n=A/G
ttaatagctaaaagtggtacagagtacagacatacngctttccacccagaatgattgttttaacagctttt

SEQ ID NO: 488 - DNA, 71 bp, artificial sequence
  Synthesized
  misc_feature (36)..(36): n=A/C
ccgaagccaaagaaaaaatggccacagtgccgaagntaggggaaacagtagggctgccaaaaatcttgagc

SEQ ID NO: 489 - DNA, 71 bp, artificial sequence
  Synthesized
  misc_feature (36)..(36): n=C/T
gtgcactcgttttctttcttgcggctcaagacaccnttgatgtccctttgtttcggtttaaatctaaattt

SEQ ID NO: 490 - DNA, 71 bp, artificial sequence
  Synthesized
  misc_feature (36)..(36): n=C/T
tagggatggacgacggcaaacctcatgatctgcagnggcattgctattattccttttcagggagcgagact

SEQ ID NO: 491 - DNA, 71 bp, artificial sequence
  Synthesized
  misc_feature (36)..(36): n=C/T
gtccggtgatatttatagcaggcaaccagcaaactnaacaacttcgggattttcgggaggcaagagcacca

SEQ ID NO: 492 - DNA, 71 bp, artificial sequence
  Synthesized
  misc_feature (36)..(36): n=A/G
agaagggggaagacaagtatccaaatactaaaagcntaataagttcagagcttagaaatcaatcacaagat

SEQ ID NO: 493 - DNA, 71 bp, artificial sequence
  Synthesized
  misc_feature (36)..(36): n=C/T
ttaccattttacccgaagttgccatttctagcctcnttttctcttttggacttaacaccttcaaattgcat

SEQ ID NO: 494 - DNA, 71 bp, artificial sequence
  Synthesized
  misc_feature (36)..(36): n=A/G
caaaacgaaaatgtaatccctagtacaaggacgccncaaactcacaccacagacactcgtgcgtccaatac

SEQ ID NO: 495 - DNA, 71 bp, artificial sequence
  Synthesized
  misc_feature (36)..(36): n=A/G
ctcgatatcgccgccaccagagctcccgtccatatnctattaccattttgggcctgcttgatttctatcct

SEQ ID NO: 496 - DNA, 71 bp, artificial sequence
  Synthesized
  misc_feature (36)..(36): n=A/C
agagctctactataagatccgacttgcggccccaanacgcaacgtctcggcaaggttcctcgcagccaaag

SEQ ID NO: 497 - DNA, 71 bp, artificial sequence
  Synthesized
  misc_feature (36)..(36): n=C/T
ctcgagtgccaaaacaacagcggagaaaaaagaatnagaacttgaaatgcttccataatctacccttggcc

SEQ ID NO: 498 - DNA, 71 bp, artificial sequence
  Synthesized
  misc_feature (36)..(36): n=A/G
ttgggcaaacaaatgatattccatttggccaacatntatttcttcttgtgctcatccccttgtcagtaaaa

SEQ ID NO: 499 - DNA, 71 bp, artificial sequence
  Synthesized
  misc_feature (36)..(36): n=G/T
cagcctgcgttcttgtcgtatcgtacgtcccatcgngggttggtagaaggcgtgcgggaacagtggtcaca

SEQ ID NO: 500 - DNA, 71 bp, artificial sequence
  Synthesized
  misc_feature (36)..(36): n=C/T
actggttgggaagggaatgtttctgctgaagaaggngctgacacaggtatatggctcgccttattgcctca

SEQ ID NO: 501 - DNA, 71 bp, artificial sequence
  Synthesized
  misc_feature (36)..(36): n=A/G
atagcgagccagctgcatcccaagtgtaaaaaaaanagagaggaaacagctgcgaggcttacccttttttt

SEQ ID NO: 502 - DNA, 71 bp, artificial sequence
  Synthesized
  misc_feature (36)..(36): n=A/G
gctgttcatagtggtagcccagagatctgcagttgngctggtcaattgacccggctaaacagcgcaacgtt

SEQ ID NO: 503 - DNA, 71 bp, artificial sequence
  Synthesized
  misc_feature (36)..(36): n=A/G
cctactgaacctttccctagtaaaatgtagtagcanacaactctcctaggtaaacaaatatactgaaacaa

SEQ ID NO: 504 - DNA, 71 bp, artificial sequence
  Synthesized
  misc_feature (36)..(36): n=A/G
cagctcagctcagatagcctgactgaactcctacantcaaccaatcagatggataatatcttaagccggag

SEQ ID NO: 505 - DNA, 71 bp, artificial sequence
  Synthesized
  misc_feature (36)..(36): n=A/C
ctggatgtagcacatcagatttgtagaccaaaaatntcggcctgttagctgttaccaagcctacatggtgt

SEQ ID NO: 506 - DNA, 71 bp, artificial sequence
  Synthesized
  misc_feature (36)..(36): n=C/T
aacattgtgcgattttcttcattttctagcgaagcngacctttgcagccacggcgcccgtggcacaccgga

SEQ ID NO: 507 - DNA, 71 bp, artificial sequence
  Synthesized
  misc_feature (36)..(36): n=G/T
atgccgcacacacaggcttctcgtacgatcattttnaggtgtaaatatgagaacgccaatctcatacatca

SEQ ID NO: 508 - DNA, 71 bp, artificial sequence
  Synthesized
  misc_feature (36)..(36): n=A/T
cacctagtttaaactggtttttagacgctggaaggnctccaaacatgttatttttttttatccggtttcta

SEQ ID NO: 509 - DNA, 71 bp, artificial sequence
  Synthesized
  misc_feature (36)..(36): n=C/T
cgagcggtgtcatacctccgctcactctagatcacnggagggggtgaagaaggttctcattggaaagggaa

SEQ ID NO: 510 - DNA, 71 bp, artificial sequence
  Synthesized
  misc_feature (36)..(36): n=A/G
aactggcccctgtatggattgtactgccttcaattntggtttgatactgaatgtgctgaaacgaccggttt

SEQ ID NO: 511 - DNA, 71 bp, artificial sequence
  Synthesized
  misc_feature (36)..(36): n=C/T
tctatcgtcggcgtttgtttactgcgccaggacggnacgccgtaaaggtttgaagtgcagatcgatctcac

SEQ ID NO: 512 - DNA, 71 bp, artificial sequence
  Synthesized
  misc_feature (36)..(36): n=A/G
gtgcctgccacgatcattaggcccagccacgtgcangatgttccggtcgtatgatgaggctttaaccgtag

SEQ ID NO: 513 - DNA, 71 bp, artificial sequence
  Synthesized
  misc_feature (36)..(36): n=C/T
cagatcaacattggtagttatgcaacccctccaacngcaactgtttttgcatcagcctctcctaccttgtc

SEQ ID NO: 514 - DNA, 71 bp, artificial sequence
  Synthesized
  misc_feature (36)..(36): n=A/G
aagcaagcacaagaaaactcaagcaaattcgtcctncttagagaactggctgtcaggagttgtggaggtag

SEQ ID NO: 515 - DNA, 71 bp, artificial sequence
  Synthesized
  misc_feature (36)..(36): n=G/T
ctttaggtagctgttctacgagtattgagtggaganatcagagatgggatggcgaagtgtgcatactcgtg

SEQ ID NO: 516 - DNA, 71 bp, artificial sequence
  Synthesized
  misc_feature (36)..(36): n=A/T
taccctgaagtgactgtggttaagttttataattanttacgtgccgtaatcccatatgcagtttaccttcc

SEQ ID NO: 517 - DNA, 71 bp, artificial sequence
  Synthesized
  misc_feature (36)..(36): n=C/T
gtctcaaaatttatattatctttctagcatcttagntaactgaaaatccagaagccaccgatagctacagt

SEQ ID NO: 518 - DNA, 71 bp, artificial sequence
  Synthesized
  misc_feature (36)..(36): n=C/T
aaaatcgattcaatgaaagttttagataattcgaanccccagaagccggtagtgcgcatggcaaatttgtg

SEQ ID NO: 519 - DNA, 71 bp, artificial sequence
  Synthesized
  misc_feature (36)..(36): n=C/T
gcgacgtagcccgagccctgaactctgaactactgnttagctgaatcctgtaatttcagtttttatttctt

SEQ ID NO: 520 - DNA, 71 bp, artificial sequence
  Synthesized
  misc_feature (36)..(36): n=C/T
gcatgtgtgtgtgcaagtgcaacaatcagcatgcanacgccttgcgcccttgcctcctccattaattaatg

SEQ ID NO: 521 - DNA, 71 bp, artificial sequence
  Synthesized
  misc_feature (36)..(36): n=C/T
tcggtcggtcgatttgcagtgctgccttgacccttncaggcagctaccataccgtgaagccgtgaaggagc

SEQ ID NO: 522 - DNA, 71 bp, artificial sequence
  Synthesized
  misc_feature (36)..(36): n=C/T
caggccgttgtctcagcgtcagcgattcctctccantcgtcaacaaccctttttcctctggaagcaggagg

SEQ ID NO: 523 - DNA, 71 bp, artificial sequence
  Synthesized
  misc_feature (36)..(36): n=C/G
atggcaccaacttttaggagtggctaactatgcttngtgtatgttctaacatagaggacgagatatacaat

SEQ ID NO: 524 - DNA, 71 bp, artificial sequence
  Synthesized
  misc_feature (36)..(36): n=A/G
tctgacgaaaacttcctcaaggtttgcccagttctngatacactcgggcctgaggttttcgagcaaggctc

SEQ ID NO: 525 - DNA, 71 bp, artificial sequence
  Synthesized
  misc_feature (36)..(36): n=A/G
gctgcggcgctgaaaagatcttcttgggtaggtccnccgagccgatcgtcggcaacgtcacctggaacgct

SEQ ID NO: 526 - DNA, 71 bp, artificial sequence
  Synthesized
  misc_feature (36)..(36): n=G/T
tgtatatccttcttcctaagattatttcagaatctnctcaagccgaacataggtttgacagaccgcacagc

SEQ ID NO: 527 - DNA, 71 bp, artificial sequence
  Synthesized
  misc_feature (36)..(36): n=C/T
ctatgattaagtactaactattaaacttaacaatanaactataaatcttgaacccattaggatatagtgcc

SEQ ID NO: 528 - DNA, 71 bp, artificial sequence
  Synthesized
  misc_feature (36)..(36): n=C/T
acaatggatggagctacatggtcgaaaagcttggtnctcagggaaagcgtggtggaggagggggctggaag

SEQ ID NO: 529 - DNA, 71 bp, artificial sequence
  Synthesized
  misc_feature (36)..(36): n=A/G
gacgtgatttgctaaaatctagacttaattctaacnattttacattcctggtggactgcgggttgattccc

SEQ ID NO: 530 - DNA, 71 bp, artificial sequence
  Synthesized
  misc_feature (36)..(36): n=A/G
tcacatctatgtgtatatcctctccctacgactacnagccttaagttgctgtcactaaggccagtcctctg

SEQ ID NO: 531 - DNA, 71 bp, artificial sequence
  Synthesized
  misc_feature (36)..(36): n=C/T
cacaacagaaaaaaaaacggccaccggcagcccctnagttaaataagatttttagttgaccagggcaagcg

SEQ ID NO: 532 - DNA, 71 bp, artificial sequence
  Synthesized
  misc_feature (36)..(36): n=G/T
tgttatccatgagctacctaggttcgaggcgcttcntgatgtgtgtgtcagctgatcgggtggaaggacaa

SEQ ID NO: 533 - DNA, 71 bp, artificial sequence
  Synthesized
  misc_feature (36)..(36): n=A/C
aattctcaaattttgtcttttgcaaaagaggactantggacattgaactgatcgtaggcttggaggaggaa

SEQ ID NO: 534 - DNA, 71 bp, artificial sequence
  Synthesized
  misc_feature (36)..(36): n=C/T
ccgcgacccgcgttgctgagccgctcttttttttcnccagtcacgcacgctgttgtcgtttctttttaaag

SEQ ID NO: 535 - DNA, 71 bp, artificial sequence
  Synthesized
  misc_feature (36)..(36): n=C/T
tagtattctatgttcacgatgtttcatcgaactagnattaagttgtgtttatactagcatatgagattgtc

SEQ ID NO: 536 - DNA, 71 bp, artificial sequence
  Synthesized
  misc_feature (36)..(36): n=C/T
gttgactgacgctgtccagacttatatcagttcccntacggcttttcctatatatactctgccctataaat

SEQ ID NO: 537 - DNA, 71 bp, artificial sequence
  Synthesized
  misc_feature (36)..(36): n=A/G
acgcccagaaggaacagggctgagagacgcatgcanccaagcacgctggagcccacgtacaacacaacaat

SEQ ID NO: 538 - DNA, 71 bp, artificial sequence
  Synthesized
  misc_feature (36)..(36): n=A/G
catagtgttgttcttcatttttttgtgttgtgtgcncctatgtttctctctttgtgttgagttgctggttt

SEQ ID NO: 539 - DNA, 71 bp, artificial sequence
  Synthesized
  misc_feature (36)..(36): n=A/G
tgttcctgtccatccttcaggtctgtcatccttgcnctacaatgcttctgtcaatgggtgttctcttttcg

SEQ ID NO: 540 - DNA, 71 bp, artificial sequence
  Synthesized
  misc_feature (36)..(36): n=C/T
aaactattactgtatgccagctaaaactttcgttgnagatgaaattaagaggaagcaactcctgagaaatt

SEQ ID NO: 541 - DNA, 71 bp, artificial sequence
  Synthesized
  misc_feature (36)..(36): n=A/G
cttcctaacgtgatagcctaatacaaattgggacancaaagggcagcgcaatttgtcaccgtagctaaagc

SEQ ID NO: 542 - DNA, 71 bp, artificial sequence
  Synthesized
  misc_feature (36)..(36): n=A/C
tttttttccctctccttcagtcgcatgctcttcctnatatttatgttcctttctttccctccctgcgtgca

SEQ ID NO: 543 - DNA, 71 bp, artificial sequence
  Synthesized
  misc_feature (36)..(36): n=A/C
acttcacttcagagatgttgcctctatggatgctgncatcgacgctcgacgctgatacaacaccactgaca

SEQ ID NO: 544 - DNA, 71 bp, artificial sequence
  Synthesized
  misc_feature (36)..(36): n=A/G
aagggatcgtcccttcaattgttgcacagccagcantactttgtctctatcatcagcatggacaacctcca

SEQ ID NO: 545 - DNA, 71 bp, artificial sequence
  Synthesized
  misc_feature (36)..(36): n=C/T
gaaaagtgtcctgttgtataaacaaagatggtagcnctgatccctggttagtggtcacccagatagtaagg

SEQ ID NO: 546 - DNA, 71 bp, artificial sequence
  Synthesized
  misc_feature (36)..(36): n=A/C
aatcaaaagaaagaaactacaatggtgagcccattnagcggctagcaaaccaatacataccacagatacca

SEQ ID NO: 547 - DNA, 71 bp, artificial sequence
  Synthesized
  misc_feature (36)..(36): n=C/T
ataaataataatagtttcacatatatttctttcacngaaatcacatacataaattttagtgatcgacgttg

SEQ ID NO: 548 - DNA, 71 bp, artificial sequence
  Synthesized
  misc_feature (36)..(36): n=A/G
aattggcgcctccgaaaaggtgtcaacacatgtttnttatctctgtgtaaactgagttctgttgtatctgg

SEQ ID NO: 549 - DNA, 71 bp, artificial sequence
  Synthesized
  misc_feature (36)..(36): n=A/G
cttccggacttcgatttaaatctaacgctaactctngccttagtgcgcatttaagtttataaatttcaggt

SEQ ID NO: 550 - DNA, 71 bp, artificial sequence
  Synthesized
  misc_feature (36)..(36): n=A/C
tgcttgtaatacaacctctctgcaactacggtccgncgtcgcacagaattggacgggtccctattcattgg

SEQ ID NO: 551 - DNA, 71 bp, artificial sequence
  Synthesized
  misc_feature (36)..(36): n=A/G
gcgggggtccgaaggcaattcatgaatggagtgacnacgataggaagctagtacaaacttttgatccatca

SEQ ID NO: 552 - DNA, 71 bp, artificial sequence
  Synthesized
  misc_feature (36)..(36): n=A/C
ttctttcatgatcttggcattcgactttattccatnttgtgtcttgtactcttgcatgttgttgtagatct

SEQ ID NO: 553 - DNA, 71 bp, artificial sequence
  Synthesized
  misc_feature (36)..(36): n=A/C
ttctttccgtatctaatccgtcggcaaactgaatcntgaatcccctttcagtattaaccttttccgaagct

SEQ ID NO: 554 - DNA, 71 bp, artificial sequence
  Synthesized
  misc_feature (36)..(36): n=C/T
aaaagaaatcaacaacaagctcaccaatagtttgcntggcttattttcctttctttgtatgttgctctaga

SEQ ID NO: 555 - DNA, 71 bp, artificial sequence
  Synthesized
  misc_feature (36)..(36): n=C/T
gcagagtctctggtggaggagatcgcgtcaccaagngggagctcaaggtacgaactctgctcccgtttcag

SEQ ID NO: 556 - DNA, 71 bp, artificial sequence
  Synthesized
  misc_feature (36)..(36): n=A/C
ggtggacgagctagagaccgtgacgaccttgcgganacgtacaaacctattaattggccatgccgacgagg

SEQ ID NO: 557 - DNA, 71 bp, artificial sequence
  Synthesized
  misc_feature (36)..(36): n=C/T
gctgaattggcactgtcattaagattcaatcccttntgttttcatgtttttcccctcatccctgccgttct

SEQ ID NO: 558 - DNA, 71 bp, artificial sequence
  Synthesized
  misc_feature (36)..(36): n=A/G
atggtttggatggcggcgtgcacggtatgggaggcngtggcgattggagagtagactgaggctgagaagag

SEQ ID NO: 559 - DNA, 71 bp, artificial sequence
  Synthesized
  misc_feature (36)..(36): n=A/G
gtccacggtccacagagacaaatctgtggctgtganccatgcacctccgcacgcgatcttatcctaaccga

SEQ ID NO: 560 - DNA, 71 bp, artificial sequence
  Synthesized
  misc_feature (36)..(36): n=A/C
atatccttgaacagtgtgaacgttgaagccacatcncctttcttagcataaacagacatcaatgcgttcca

SEQ ID NO: 561 - DNA, 71 bp, artificial sequence
  Synthesized
  misc_feature (36)..(36): n=C/T
gcagtagaagctgatatggattaaagtcaagcgaanaggctctaatgcatagagacaaaacgacggttgaa

SEQ ID NO: 562 - DNA, 71 bp, artificial sequence
  Synthesized
  misc_feature (36)..(36): n=G/T
aaaaaaaaactattgaccaggtgttgaagttgtatngtgaattatgatattgtccttgttctgtttctaat

SEQ ID NO: 563 - DNA, 71 bp, artificial sequence
  Synthesized
  misc_feature (36)..(36): n=C/T
gctttcataagtccacttctaacgagaatcactctngtacagccaaacggtaaaaaagtgacatgcttcat

SEQ ID NO: 564 - DNA, 71 bp, artificial sequence
  Synthesized
  misc_feature (36)..(36): n=C/T
agagtcatggaacaccttgcgctttcctttgagtgnggtgcttgggtctggtgtacagttttcacccacac

SEQ ID NO: 565 - DNA, 71 bp, artificial sequence
  Synthesized
  misc_feature (36)..(36): n=C/T
accatagggtcaagtagtatgaacatgaataagttncgtaatgatctagcgaaggcactttgcgagtcgag

SEQ ID NO: 566 - DNA, 71 bp, artificial sequence
  Synthesized
  misc_feature (36)..(36): n=A/G
tcctcgcagagggggccctcgatgacgatctgctgngaccctgtgctgccctgcaatatatataataatcg

SEQ ID NO: 567 - DNA, 71 bp, artificial sequence
  Synthesized
  misc_feature (36)..(36): n=C/T
aaagaggtctctacgagaatatcttaaacctcatgntgacgtaagttcctgaccatttttttgcctgtttg

SEQ ID NO: 568 - DNA, 71 bp, artificial sequence
  Synthesized
  misc_feature (36)..(36): n=A/G
ttggctagagagaccatagacacaatgttttctcgnttccagtcgattatcaacaatatgcgtgccaataa

SEQ ID NO: 569 - DNA, 71 bp, artificial sequence
  Synthesized
  misc_feature (36)..(36): n=G/T
ctataatatatatcgctgtggatcggagtacatggncacagtggtgacggatggatgtatgtatgcatgtg

SEQ ID NO: 570 - DNA, 71 bp, artificial sequence
  Synthesized
  misc_feature (36)..(36): n=G/T
gtatacttttagtgtttttgtttagctagagatgcnagtgtgtttgcttgttgttgtgcacagtttgtggt

SEQ ID NO: 571 - DNA, 71 bp, artificial sequence
  Synthesized
  misc_feature (36)..(36): n=A/G
cttgctggccactcgagttatagaaagttgcatttntgtgcatcccacgccagccaaacactgccgacgag

SEQ ID NO: 572 - DNA, 71 bp, artificial sequence
  Synthesized
  misc_feature (36)..(36): n=A/G
ctcacctttttgccagcgatgggcacgatcctgagngtgccggaggccttgtcaaggacgccaagcgcgta

SEQ ID NO: 573 - DNA, 71 bp, artificial sequence
  Synthesized
  misc_feature (36)..(36): n=C/T
gcaaaactgcatcggaaaaaaagatgggtggctgtntcttcagcttgaataatacatttgtcacaggtgta

SEQ ID NO: 574 - DNA, 71 bp, artificial sequence
  Synthesized
  misc_feature (36)..(36): n=C/T
aacagccagtaaaagttgcggccaccaaagaaaacngtgtgccccttttctccttaaactaaggaaaaaag

SEQ ID NO: 575 - DNA, 71 bp, artificial sequence
  Synthesized
  misc_feature (36)..(36): n=A/G
gatggtaggcttcagttatcataggatatgttatancatcaatatgatgaggctaactctatccttttgca

SEQ ID NO: 576 - DNA, 71 bp, artificial sequence
  Synthesized
  misc_feature (36)..(36): n=C/T
tccatcatcatagctttcgcactttgtaatctcccnggtgatctttagccaccatccattgtccactagct

SEQ ID NO: 577 - DNA, 71 bp, artificial sequence
  Synthesized
  misc_feature (36)..(36): n=A/G
gtcgttgaatgcgtcgtcatagcggttggaccatcnaactatccaatgataacgaattccaactacaacga

SEQ ID NO: 578 - DNA, 71 bp, artificial sequence
  Synthesized
  misc_feature (36)..(36): n=G/T
gttcagggaaaaactgacccaaaatcagagcgtttngcactcagatcagcttttggcggtcacaatctaaa

SEQ ID NO: 579 - DNA, 71 bp, artificial sequence
  Synthesized
  misc_feature (36)..(36): n=C/T
accattaatttcccgacttctacatgtattgttcanttatgtaggtaagtccacaaaaaaagttcaaaatt

SEQ ID NO: 580 - DNA, 71 bp, artificial sequence
  Synthesized
  misc_feature (36)..(36): n=A/G
ctcatgcttcatatatggtgctcgacctccacatcnttatcatgtaggtgtgatagtgcccaaagcagcga

SEQ ID NO: 581 - DNA, 71 bp, artificial sequence
  Synthesized
  misc_feature (36)..(36): n=A/C
atggcaaaggtaggaagtaattaggggtgaacgtgnactcacaaaattttacaaaaccagtgatttattat

SEQ ID NO: 582 - DNA, 71 bp, artificial sequence
  Synthesized
  misc_feature (36)..(36): n=C/T
tattaacgtgattgccgtatttttcttattcttttntagtagattcgtatgccatttacacttttaggact

SEQ ID NO: 583 - DNA, 71 bp, artificial sequence
  Synthesized
  misc_feature (36)..(36): n=A/G
gcccactcatcagtcgtgcgtgtgtctgctcccgcncgctcgcatgctggttcttttctcggctgttgatc

SEQ ID NO: 584 - DNA, 71 bp, artificial sequence
  Synthesized
  misc_feature (36)..(36): n=G/T
taggaggaacatatccgataccatattgcgtagtgncctcacaagcaatgtggaactgtagagaggtaatt

SEQ ID NO: 585 - DNA, 71 bp, artificial sequence
  Synthesized
  misc_feature (36)..(36): n=G/T
tcctagccgcgtctgagcaacctaacctacccgccncttgctttttatagggctgggggacgtgtgggaga

SEQ ID NO: 586 - DNA, 71 bp, artificial sequence
  Synthesized
  misc_feature (36)..(36): n=A/G
ggcggacgtatgccgcgctgctgtccagtggggctnggccacatcgtgatttgccctgtccatggattgta

SEQ ID NO: 587 - DNA, 71 bp, artificial sequence
  Synthesized
  misc_feature (36)..(36): n=A/C
acaagtatcgggtggcactctacttgttctaaaatnaaaaaaggtagagcttgcctgtgaaccgaccagta

SEQ ID NO: 588 - DNA, 71 bp, artificial sequence
  Synthesized
  misc_feature (36)..(36): n=C/T
gaaaggttgccttgccatgatgactctagtagcagncctcacacgtttccacctcactagtgccatgctcc

SEQ ID NO: 589 - DNA, 71 bp, artificial sequence
  Synthesized
  misc_feature (36)..(36): n=C/T
aacggaaacaataccagtgttcgctacaatacaaantgttaaaaaaaggaggaaaaatacaagcaagactg

SEQ ID NO: 590 - DNA, 71 bp, artificial sequence
  Synthesized
  misc_feature (36)..(36): n=G/T
tgtcccctttgttggtttggcatgttgtaggtagtnggagcaggatacaattttgcttcacatgggacgat

SEQ ID NO: 591 - DNA, 71 bp, artificial sequence
  Synthesized
  misc_feature (36)..(36): n=A/C
tgccctacagtaaggaacattatgagttcaactatnagttgtcaatattgttggtttctgttctagtctgc

SEQ ID NO: 592 - DNA, 71 bp, artificial sequence
  Synthesized
  misc_feature (36)..(36): n=A/G
ttaattgtttgcccttgttaggtctgcgagatagcngtcccttatcttgcgcatctcggctgcggcatcac

SEQ ID NO: 593 - DNA, 71 bp, artificial sequence
  Synthesized
  misc_feature (36)..(36): n=C/T
ttgctggggagggaggtgcgtgagaatctcttcgangacgttgccacactcttccacgacctgtgcaacgg

SEQ ID NO: 594 - DNA, 71 bp, artificial sequence
  Synthesized
  misc_feature (36)..(36): n=C/T
ctcatgataagtagatggttcaacaattactgtagnagcccgtggaaaaccataacgatctggaggttcaa

SEQ ID NO: 595 - DNA, 71 bp, artificial sequence
  Synthesized
  misc_feature (36)..(36): n=C/T
gttacagattcgagcactattctaagttgtaactcngatgtgctgctttcgtgtgctcgttcttgtcttgt

SEQ ID NO: 596 - DNA, 71 bp, artificial sequence
  Synthesized
  misc_feature (36)..(36): n=A/G
ttcggcgtaaataaaagtatcaagtgcggagtagcnaagggggagaagctaaagtcttgtgcggtaggaaa

SEQ ID NO: 597 - DNA, 71 bp, artificial sequence
  Synthesized
  misc_feature (36)..(36): n=A/G
tatttttgttggagctatcattttatcgttgttctnggatgccaaattctcatggtgatactcactagtat

SEQ ID NO: 598 - DNA, 71 bp, artificial sequence
  Synthesized
  misc_feature (36)..(36): n=A/G
aaaatatatatataaacgggaggacgattggacganaggaaggagcacgtccttcgtccgatccaaacacg

SEQ ID NO: 599 - DNA, 71 bp, artificial sequence
  Synthesized
  misc_feature (36)..(36): n=C/T
tatcgtgtagaccattgggtgcacttagactttttnaaactcgggatggtaagctccatatggtaaagtca

SEQ ID NO: 600 - DNA, 71 bp, artificial sequence
  Synthesized
  misc_feature (36)..(36): n=A/G
agtacagccgggtcacccgtttgttttctcttgctnagtgaaatttgatgctagttagaaatattaaatat

SEQ ID NO: 601 - DNA, 71 bp, artificial sequence
  Synthesized
  misc_feature (36)..(36): n=A/G
aatttgaccttttttaaccgatcaattactcctagnccagcacacattctccatctagggaaaacagtgca

SEQ ID NO: 602 - DNA, 71 bp, artificial sequence
  Synthesized
  misc_feature (36)..(36): n=C/T
tgaaggagtcacaatatgaattgttataacacaagncctggcctcaaatatttgtttatgaaacatgaatc

SEQ ID NO: 603 - DNA, 71 bp, artificial sequence
  Synthesized
  misc_feature (36)..(36): n=C/T
tcttgtgagccaattagaggaaaaacatatgatctnaaaacattcaatacatgtttactttagccgttcat

SEQ ID NO: 604 - DNA, 71 bp, artificial sequence
  Synthesized
  misc_feature (36)..(36): n=C/T
ggacaaggtctgaaggagatgctggagtactacganaatgcggtgagtccgtgatggggattaccatttgc

SEQ ID NO: 605 - DNA, 71 bp, artificial sequence
  Synthesized
  misc_feature (36)..(36): n=A/C
taatcccatgcggcttgctgcttagttggtacaccntcctgcggttttaaactaatataatggcgccagta

SEQ ID NO: 606 - DNA, 71 bp, artificial sequence
  Synthesized
  misc_feature (36)..(36): n=C/T
ggtggcgattcatcgccggagccccctggaactggngagctgtttggtcgatccgctgtgactgtgatgca

SEQ ID NO: 607 - DNA, 71 bp, artificial sequence
  Synthesized
  misc_feature (36)..(36): n=A/G
gtgagccgcatacatgagtaggagaactgtctccantacgcgagaggtaagaagcgtttgagatttcagtt

SEQ ID NO: 608 - DNA, 71 bp, artificial sequence
  Synthesized
  misc_feature (36)..(36): n=C/T
gaacattgtttgatcccgaaactcaaaatcctagcnttcttaggtaatatttgctttatcctaatgcagta

SEQ ID NO: 609 - DNA, 71 bp, artificial sequence
  Synthesized
  misc_feature (36)..(36): n=C/T
cgttttagaaataacctctgagttatatcaagccangtcggcgttttagaagtaacagccgagtgatgact

SEQ ID NO: 610 - DNA, 71 bp, artificial sequence
  Synthesized
  misc_feature (36)..(36): n=A/G
gacagcgcgacgttcacttcctaacagtagagcgcnaagacaacaatagtcctcacccagttaaaaacaaa

SEQ ID NO: 611 - DNA, 71 bp, artificial sequence
  Synthesized
  misc_feature (36)..(36): n=A/C
gattatattatatataaggtaagaaaaattattganaattgcatatgtggaaaaatagatgaaatatacca

SEQ ID NO: 612 - DNA, 71 bp, artificial sequence
  Synthesized
  misc_feature (36)..(36): n=A/G
ccaccatcgatcgttaccttagttaactgccgacgncccattgtggccgtcggacataagcaagatgtgta

SEQ ID NO: 613 - DNA, 71 bp, artificial sequence
  Synthesized
  misc_feature (36)..(36): n=C/T
agctaggagacatccatgaccatgaccggtggtgtnctgaagagacgcgtctgaagagaggggggcctttt

SEQ ID NO: 614 - DNA, 71 bp, artificial sequence
  Synthesized
  misc_feature (36)..(36): n=A/G
ttttggatcgatcaaagctacggattttggtcagcnatgctttactaacataacatcaatctatccagatt

SEQ ID NO: 615 - DNA, 71 bp, artificial sequence
  Synthesized
  misc_feature (36)..(36): n=C/T
tcacacgaaccatagtcagtaaaccatacaaccacngcagggagccatttgtcctcacgtgatgacgtgaa

SEQ ID NO: 616 - DNA, 71 bp, artificial sequence
  Synthesized
  misc_feature (36)..(36): n=A/G
cgactgatgactcgaccagtaagtaataaacaatcnatctatggacagcaggaaatttcagacagtatccc

SEQ ID NO: 617 - DNA, 71 bp, artificial sequence
  Synthesized
  misc_feature (36)..(36): n=A/G
cgtatttgctccctgatctttacggagtacttcccnggaccagccgtcagtggtagaggcgcccgtagaga

SEQ ID NO: 618 - DNA, 71 bp, artificial sequence
  Synthesized
  misc_feature (36)..(36): n=C/T
attcccactcatacacaaaaacagctgccagttggncatggaagatgagaacgaaaagaaaaaggaaagca

SEQ ID NO: 619 - DNA, 71 bp, artificial sequence
  Synthesized
  misc_feature (36)..(36): n=A/T
tttgttttttttttctttaccgcagtcaaccattcntatttcatcagtacattgtcgttgtttgattcgat

SEQ ID NO: 620 - DNA, 71 bp, artificial sequence
  Synthesized
  misc_feature (36)..(36): n=C/T
ccacgttagcctcaacgatgtccacaagccagtaangtggtggacttaccgcgacccctttatggcggttc

SEQ ID NO: 621 - DNA, 71 bp, artificial sequence
  Synthesized
  misc_feature (36)..(36): n=C/T
gaaggaagcccatgactctgactattccattcatcncggtagcaccaagatgtattaggatctgaaacaga

SEQ ID NO: 622 - DNA, 71 bp, artificial sequence
  Synthesized
  misc_feature (36)..(36): n=G/T
atggagtatccctacaatgaaatcattggtcaaggnacactgaacgcctttgaagtgatactccactcaac

SEQ ID NO: 623 - DNA, 71 bp, artificial sequence
  Synthesized
  misc_feature (36)..(36): n=G/T
ttttgtcatttccatgagtcctttagatatttccanttttagaatttgtaccctttagcaggtgctattac

SEQ ID NO: 624 - DNA, 71 bp, artificial sequence
  Synthesized
  misc_feature (36)..(36): n=C/T
gtagaaaccatgggggatatgcccaatgtagacgantgtggctgtgttttcgggctcttcaggctgctgca

SEQ ID NO: 625 - DNA, 71 bp, artificial sequence
  Synthesized
  misc_feature (36)..(36): n=A/G
aagaacgaactgaccagatggtcaagctcgaaagcnaacttctgcgtcttgagcagcttggcttgcttttt

SEQ ID NO: 626 - DNA, 71 bp, artificial sequence
  Synthesized
  misc_feature (36)..(36): n=A/C
gtctcgtcctcgaagcctcctcccttgagtcgctgngcaaagaagtcgtacttcataacatctaggtcgct

SEQ ID NO: 627 - DNA, 71 bp, artificial sequence
  Synthesized
  misc_feature (36)..(36): n=A/G
tagagttgaagaacgaggattggtggaatacgctgncgtaattgtccctgctcgattgccccatcccgctg

SEQ ID NO: 628 - DNA, 71 bp, artificial sequence
  Synthesized
  misc_feature (36)..(36): n=C/T
cgactggatacaatgataatgcaaactgacacgagngcaatggacagtgaagcaaaacaatactttaagct

SEQ ID NO: 629 - DNA, 71 bp, artificial sequence
  Synthesized
  misc_feature (36)..(36): n=G/T
aacatgcatttctacgacacacctgcgtctgcccgngtgagtgggagtggagacggtatctgcatttagaa

SEQ ID NO: 630 - DNA, 71 bp, artificial sequence
  Synthesized
  misc_feature (36)..(36): n=A/G
gacgggaacaagaaggacgacgaagatgaaggacanaccctccagaaaggaaaaacaaaattctgccacgt

SEQ ID NO: 631 - DNA, 71 bp, artificial sequence
  Synthesized
  misc_feature (36)..(36): n=C/T
ggccaccaagctggcaggttctagctagggtttcgncatagatggatggatggatctacacgcggttagca

SEQ ID NO: 632 - DNA, 71 bp, artificial sequence
  Synthesized
  misc_feature (36)..(36): n=C/T
tggaatggaagcctcctactacggtctggcagattnagagttttctagcattagctggatattatcgacga

SEQ ID NO: 633 - DNA, 71 bp, artificial sequence
  Synthesized
  misc_feature (36)..(36): n=C/T
agaaaactttcataggccaaaataatttggattaantgtatacatgccactcagcttttgtaaaagtaaat

SEQ ID NO: 634 - DNA, 71 bp, artificial sequence
  Synthesized
  misc_feature (36)..(36): n=C/T
ggccacaccaacaatgtcaggagaataaggtgagcncactatacatgtcgcgacaatagaagcttccgttg

SEQ ID NO: 635 - DNA, 71 bp, artificial sequence
  Synthesized
  misc_feature (36)..(36): n=C/T
aatcaaggtaaggctaagcaataaccaaggtctcantttgtagaaaaacttactaatagtggatccttaag

SEQ ID NO: 636 - DNA, 71 bp, artificial sequence
  Synthesized
  misc_feature (36)..(36): n=A/C
ggtactttggttttggagactgctactgactgctgncgtcgtcgggccgctcctctcacctctggtaaata

SEQ ID NO: 637 - DNA, 71 bp, artificial sequence
  Synthesized
  misc_feature (36)..(36): n=A/G
gaggcggtcttgattgctcgcactgcgatgacgtgngacttgatcctgttggggacttgttctcaaatgct

SEQ ID NO: 638 - DNA, 71 bp, artificial sequence
  Synthesized
  misc_feature (36)..(36): n=A/G
gcaacactttccactgagctggggaggcaaagaganagagagcttagccgcaaggcgaagcagcggcggta

SEQ ID NO: 639 - DNA, 71 bp, artificial sequence
  Synthesized
  misc_feature (36)..(36): n=C/T
gggagttacggatccgggcgaaaagagttggtggcnaggacgggcgctgtctggtggagaagctcggccat

SEQ ID NO: 640 - DNA, 71 bp, artificial sequence
  Synthesized
  misc_feature (36)..(36): n=G/T
cttcccattttattttccatcgtttcatttttttcntctcttgttcagtcatgtgccgcgcctctttaatg

SEQ ID NO: 641 - DNA, 71 bp, artificial sequence
  Synthesized
  misc_feature (36)..(36): n=C/T
aacatatagttaaggaaaatcattaatgttgtattncctttattattcttcccttgaatacaagtgattac

SEQ ID NO: 642 - DNA, 71 bp, artificial sequence
  Synthesized
  misc_feature (36)..(36): n=A/G
acatcgtcatatgctacctcacatgggctcccaccngttaccaagaactttgttttgctcaagttcccata

SEQ ID NO: 643 - DNA, 71 bp, artificial sequence
  Synthesized
  misc_feature (36)..(36): n=C/T
ctcccacatagtactgcatctccactatcggaatcnggctctttgccgaatgccaagtgattcagacactc

SEQ ID NO: 644 - DNA, 71 bp, artificial sequence
  Synthesized
  misc_feature (36)..(36): n=C/T
aatcatgattcagttttgtttttttgactttggtgngaaccccctaacaagttgaaagatctagcatgggc

SEQ ID NO: 645 - DNA, 71 bp, artificial sequence
  Synthesized
  misc_feature (36)..(36): n=C/T
actggagttcggtggtgcgaacgcgacaacggcggnggtcatgccggcgtgcatgtgattcggtgattcca

SEQ ID NO: 646 - DNA, 71 bp, artificial sequence
  Synthesized
  misc_feature (36)..(36): n=C/G
ctacttatatgcacttgggcaaggcactgggcagantacgcagcccgggatctcgggatttttttgttact

SEQ ID NO: 647 - DNA, 71 bp, artificial sequence
  Synthesized
  misc_feature (36)..(36): n=C/T
aggattttcatcggcatgacttggtttatgagggtntgacgtcaccggcacatgtggtatggcaacgctaa

SEQ ID NO: 648 - DNA, 71 bp, artificial sequence
  Synthesized
  misc_feature (36)..(36): n=A/G
cttagtttgggccataactcaaatcctgatcaaagnttaagcaaaaggtgagtttcctagacttagtcaat

SEQ ID NO: 649 - DNA, 71 bp, artificial sequence
  Synthesized
  misc_feature (36)..(36): n=A/G
actaaaattagaagctagagtcaggcacatataccntgtgccccgtcatgggtacagagaagattttttcg

SEQ ID NO: 650 - DNA, 71 bp, artificial sequence
  Synthesized
  misc_feature (36)..(36): n=C/T
acctggtcaaataggctcaagaggtcttaatgtcangtttactatttgcgggtcaaagcttacctcggttt

SEQ ID NO: 651 - DNA, 71 bp, artificial sequence
  Synthesized
  misc_feature (36)..(36): n=A/G
gtagttgtagtccgtattgtgctgataagtttttgngtactattgatgataatatacttgaatggagcaca

SEQ ID NO: 652 - DNA, 71 bp, artificial sequence
  Synthesized
  misc_feature (36)..(36): n=A/G
tttctttagaagaagtctagaaatttcgacatttangtgagaaggaatctctcttgacaaattttttttga

SEQ ID NO: 653 - DNA, 71 bp, artificial sequence
  Synthesized
  misc_feature (36)..(36): n=C/T
agcgatggtgatcaccttagttaagctcgatcgtanggtacggatacatcaaatgtgtgtggggggtacca

SEQ ID NO: 654 - DNA, 71 bp, artificial sequence
  Synthesized
  misc_feature (36)..(36): n=G/T
tctgtgcaacagattaactagctgcattgttaactnttagtgccatgtatatttttctctacggctagaac

SEQ ID NO: 655 - DNA, 71 bp, artificial sequence
  Synthesized
  misc_feature (36)..(36): n=C/G
agacaatattctgttggctctgacttgccagccgcngcagtcgtgccctatctatggtgccacctttaact

SEQ ID NO: 656 - DNA, 71 bp, artificial sequence
  Synthesized
  misc_feature (36)..(36): n=C/T
agctcctcgacaaggtacgtacacagatttgtatanatcgagcatctagctagctttctagtatgttcaga

SEQ ID NO: 657 - DNA, 71 bp, artificial sequence
  Synthesized
  misc_feature (36)..(36): n=C/T
ctgtacacaggtaataaggagatgtgcatttcagtntttatgtacttcattttatgtatttagaatctatt

SEQ ID NO: 658 - DNA, 71 bp, artificial sequence
  Synthesized
  misc_feature (36)..(36): n=C/T
ttccccatacctaaaacattcacccatggccgcgancccttcatcctcctgaatcccggccgccgcttctt

SEQ ID NO: 659 - DNA, 71 bp, artificial sequence
  Synthesized
  misc_feature (36)..(36): n=C/T
cccatagatcaaacaagcagtcttgttgaagaaaanccccctggacaatcctcttcaattgctgatgcgtg

SEQ ID NO: 660 - DNA, 71 bp, artificial sequence
  Synthesized
  misc_feature (36)..(36): n=A/C
aaagtgaccgatgatcatatatgcagatgcctgagnctgtgagttgaggtggagtctgttcaaacgaaatt

SEQ ID NO: 661 - DNA, 71 bp, artificial sequence
  Synthesized
  misc_feature (36)..(36): n=C/T
cctataaaagggccgccctgagcccatcatctcctngcaccggcctcggccactctcctccccctcccctg

SEQ ID NO: 662 - DNA, 71 bp, artificial sequence
  Synthesized
  misc_feature (36)..(36): n=A/G
agtgtataaatatacagtgaaacagcttgcactggngacaccacttcccaacgcaagctcttccaaaaatt

SEQ ID NO: 663 - DNA, 71 bp, artificial sequence
  Synthesized
  misc_feature (36)..(36): n=A/C
acagaaggcataatcaattatctatctagtaaaccnttttggtttgcatgctgccatacaaaaaatggtaa

SEQ ID NO: 664 - DNA, 71 bp, artificial sequence
  Synthesized
  misc_feature (36)..(36): n=A/C
aaataacgggaccgcaggcgattgttaattcagacngtacatgatcttgattatagccatatatatgaaac

SEQ ID NO: 665 - DNA, 71 bp, artificial sequence
  Synthesized
  misc_feature (36)..(36): n=C/T
acaatacagatgagctaatattaaacatgatcaganggtaggattaaaactgacatacctttcccatttgt

SEQ ID NO: 666 - DNA, 71 bp, artificial sequence
  Synthesized
  misc_feature (36)..(36): n=G/T
aggggatcagaggatggagttatccaaatgtaggcnggtacaactgaagaaacaggagccgggaaggcgaa

SEQ ID NO: 667 - DNA, 71 bp, artificial sequence
  Synthesized
  misc_feature (36)..(36): n=A/G
ctaacccttctcctgtttcaaatcgtttcagacgtnagaaaccagccggtcctcatccactgcaagagagg

SEQ ID NO: 668 - DNA, 71 bp, artificial sequence
  Synthesized
  misc_feature (36)..(36): n=C/T
aggcgctcgataacaataggcgatgtggcactaaanggcaaacagacacactaccgcttctatccgcctgg

SEQ ID NO: 669 - DNA, 71 bp, artificial sequence
  Synthesized
  misc_feature (36)..(36): n=C/G
aatgaaaacattaaacatgaattcatggagcacctntcttgttgctccactatattggtagagttagggta

SEQ ID NO: 670 - DNA, 71 bp, artificial sequence
  Synthesized
  misc_feature (36)..(36): n=A/G
ccaggtggtgtaattacaatgcatgtggtagtgcgncctccacaagctgacaaaaacagtggtattgccga

SEQ ID NO: 671 - DNA, 71 bp, artificial sequence
  Synthesized
  misc_feature (36)..(36): n=G/T
tgccggagaaatccgtgcaggagcagaactcagtcncatcatcttcctccacccgacagatgattggagga

SEQ ID NO: 672 - DNA, 71 bp, artificial sequence
  Synthesized
  misc_feature (36)..(36): n=C/T
gtggagagttcatcgccatggagttcaccacctacngctctgacaaaggtattcagcggcacttctccgct

SEQ ID NO: 673 - DNA, 71 bp, artificial sequence
  Synthesized
  misc_feature (36)..(36): n=A/G
tatgcgggcggccttgttgaaaacacggtagacatncttgaccgatccataaccaagaagaaaacattcat

SEQ ID NO: 674 - DNA, 71 bp, artificial sequence
  Synthesized
  misc_feature (36)..(36): n=C/T
ccttaggattttcagaaaactggcaggtatgaaacncaattctgataatagagtcaaaatatcttgagtat

SEQ ID NO: 675 - DNA, 71 bp, artificial sequence
  Synthesized
  misc_feature (36)..(36): n=A/G
gtgcttccaacttgataaggtagtagctccatggcngtgactatatgggaagaatcaaaagagttccttag

SEQ ID NO: 676 - DNA, 71 bp, artificial sequence
  Synthesized
  misc_feature (36)..(36): n=A/G
acttttgtcatgaagcaacaggaatcccaggctgcngtcttatcagttcatcacattggagtcccctgtgt

SEQ ID NO: 677 - DNA, 71 bp, artificial sequence
  Synthesized
  misc_feature (36)..(36): n=A/G
catcacagtgaggatctggcagaggcggctttcagngaatcagaggtaaaggatccgatccaccgcgcatc

SEQ ID NO: 678 - DNA, 71 bp, artificial sequence
  Synthesized
  misc_feature (36)..(36): n=G/T
tcatctctctggagctacttactaggcggcggctanagctaggcgtatctcttcttcgtgcgcgatggtgg

SEQ ID NO: 679 - DNA, 71 bp, artificial sequence
  Synthesized
  misc_feature (36)..(36): n=C/T
agtttccactagattattcttgagaaacactcatgnccatgtggtcgagccctaatccttggttcttgatt

SEQ ID NO: 680 - DNA, 71 bp, artificial sequence
  Synthesized
  misc_feature (36)..(36): n=C/T
aaatataaaagaattgggcgggacctaattgtattntgtatcacgttttctacctctttgcatcgttgata

SEQ ID NO: 681 - DNA, 71 bp, artificial sequence
  Synthesized
  misc_feature (36)..(36): n=C/T
cctcaggatgttgcgactacactgtgacgacgttgncactcacaatacgccgatcaagactccctccatta

SEQ ID NO: 682 - DNA, 71 bp, artificial sequence
  Synthesized
  misc_feature (36)..(36): n=A/G
cctgtgaattaaagtcacatgcattctatcacatgntgttaattatccaaaataaaaagcaatcccaatgg

SEQ ID NO: 683 - DNA, 71 bp, artificial sequence
  Synthesized
  misc_feature (36)..(36): n=A/G
agggaggcgagttctttgattctatcgatttggccntgcaagtgccggaaatctgatgtaggtgtacacct

SEQ ID NO: 684 - DNA, 71 bp, artificial sequence
  Synthesized
  misc_feature (36)..(36): n=C/T
cccctgagtctatgcttaatagaaagaccaatcacngcgatattttattttgtccgtttggagtctaagta

SEQ ID NO: 685 - DNA, 71 bp, artificial sequence
  Synthesized
  misc_feature (36)..(36): n=A/G
actttataacatatatgtagtcaaatgaaaaggtcntatgtgtattgaacccaatcaagctagtttcgaat

SEQ ID NO: 686 - DNA, 71 bp, artificial sequence
  Synthesized
  misc_feature (36)..(36): n=A/G
ggaatttggcacgggattgaaaacgggtctcacganctaataaaaaatgatcaaatttatgggcgcgttag

SEQ ID NO: 687 - DNA, 71 bp, artificial sequence
  Synthesized
  misc_feature (36)..(36): n=C/T
agaggcagatccagacggacactttgataatttatnattgtggaaacaacataaagctatggaacttatct

SEQ ID NO: 688 - DNA, 71 bp, artificial sequence
  Synthesized
  misc_feature (36)..(36): n=A/C
acaataataattagtcgataacgatgcaatttaggnaaatacaacaaattcaccttaaaagaccttatctt

SEQ ID NO: 689 - DNA, 71 bp, artificial sequence
  Synthesized
  misc_feature (36)..(36): n=C/T
aagcacttgcctccttcccttagaagcctctctaangtcgcgcctctgtgtctgcctagcttgttccctgc

SEQ ID NO: 690 - DNA, 71 bp, artificial sequence
  Synthesized
  misc_feature (36)..(36): n=A/G
attaaattcggtcccgtatgcatgcatcgatcggcncctagatcgggggatgttgccagtaccatagatga

SEQ ID NO: 691 - DNA, 71 bp, artificial sequence
  Synthesized
  misc_feature (36)..(36): n=G/T
tgctccgctgagatgagggatttccacgcttatccntgtatgtctattgtctagccgatgacgaggaggta

SEQ ID NO: 692 - DNA, 71 bp, artificial sequence
  Synthesized
  misc_feature (36)..(36): n=C/T
caaaatcaacgtgaacacataatcggcagaatcgtngcgataggagtccgtcatttcctatatcctaaacc

SEQ ID NO: 693 - DNA, 71 bp, artificial sequence
  Synthesized
  misc_feature (36)..(36): n=A/G
gtagtttgcttgtgtcgttggaatttctcatccganccgagcctccgtatcacctccgcacattgccatgg

SEQ ID NO: 694 - DNA, 71 bp, artificial sequence
  Synthesized
  misc_feature (36)..(36): n=A/C
actgatctttctagatcgatgacatattattcttcntcatcagatgtaccaaacttcagagctggaggtcg

SEQ ID NO: 695 - DNA, 71 bp, artificial sequence
  Synthesized
  misc_feature (36)..(36): n=A/C
acagtaacttcaaggctcgatgggacatggagggantgcagaaggatctacagcatgttctggagatacgt

SEQ ID NO: 696 - DNA, 71 bp, artificial sequence
  Synthesized
  misc_feature (36)..(36): n=A/G
ataatttcaatcacgcattatagttgatagactggnccgaaggtggatacttaacaaccgattcaccaatg

SEQ ID NO: 697 - DNA, 71 bp, artificial sequence
  Synthesized
  misc_feature (36)..(36): n=G/T
tattccttttctcttcatacaatacaaatttacagncataccttcggctccttgacacaagataacacaaa

SEQ ID NO: 698 - DNA, 71 bp, artificial sequence
  Synthesized
  misc_feature (36)..(36): n=A/C
gtcccacacgatgaggttcttgtccttgacgatcanctccacgttgtccgcctgcagctgatccttggaga

SEQ ID NO: 699 - DNA, 71 bp, artificial sequence
  Synthesized
  misc_feature (36)..(36): n=C/T
ttcactatcacatgtgaaccttgaggactgctcttntcagagagcaaagaattcggcgaatgtgtgctttc

SEQ ID NO: 700 - DNA, 71 bp, artificial sequence
  Synthesized
  misc_feature (36)..(36): n=A/G
ttcgtagcgtcatctagagaagtgctacctttggtngtcactttcttaggggccatcgcaggtttgggttg

SEQ ID NO: 701 - DNA, 71 bp, artificial sequence
  Synthesized
  misc_feature (36)..(36): n=A/C
aatgtgagcacataaatggataccaaactcaatcanactcactgtgtgcgattcaagatcactagcgacta

SEQ ID NO: 702 - DNA, 71 bp, artificial sequence
  Synthesized
  misc_feature (36)..(36): n=C/T
gcaagcccatatagtctgccacggattgcatcatgncgtccttctgaagaagcagttgtgctgcaccactg

SEQ ID NO: 703 - DNA, 71 bp, artificial sequence
  Synthesized
  misc_feature (36)..(36): n=C/T
aaacctttttttgactttggcacgatggaagtcgcngaagcagcaatctttcttttctttccttgctttcg

SEQ ID NO: 704 - DNA, 71 bp, artificial sequence
  Synthesized
  misc_feature (36)..(36): n=C/T
tttataaatcatgagaaaaggtattaaagcaataancaattcaactttaatatgagttacattttggttag

SEQ ID NO: 705 - DNA, 71 bp, artificial sequence
  Synthesized
  misc_feature (36)..(36): n=A/G
gatgagcaaggtattgatccatcttgggctgctgtngttacgccggttttacgagtcaagacaatttatat

SEQ ID NO: 706 - DNA, 71 bp, artificial sequence
  Synthesized
  misc_feature (36)..(36): n=A/G
tgatcacaactgcttgtatttttggaaaatatccantcaaactttgaaactttgaccgccaataactttta

SEQ ID NO: 707 - DNA, 71 bp, artificial sequence
  Synthesized
  misc_feature (36)..(36): n=C/T
tgtcaaatcacgtggactagcctacgtggtttgcgncgatcggctccttgagctgttggtcgtttctttta

SEQ ID NO: 708 - DNA, 71 bp, artificial sequence
  Synthesized
  misc_feature (36)..(36): n=C/T
caccattcaaaaactgatttatatattatgcaatgngctataagagaaggttaagacatccccatcgagat

SEQ ID NO: 709 - DNA, 71 bp, artificial sequence
  Synthesized
  misc_feature (36)..(36): n=C/T
tgttttcttttcttttctggatatctatccatccanagacacgcgaaatgcattccacagttgtcctatgt

SEQ ID NO: 710 - DNA, 71 bp, artificial sequence
  Synthesized
  misc_feature (36)..(36): n=C/T
ttcatgtgatggatctgaccgatcattggttggtcnagatgatggatattgagtgataaatagctcagtgc

SEQ ID NO: 711 - DNA, 71 bp, artificial sequence
  Synthesized
  misc_feature (36)..(36): n=A/C
caattggtacatatgcattgcgagttctgagatcanataagtaaacaatacataatcaaatgggctgcttt

SEQ ID NO: 712 - DNA, 71 bp, artificial sequence
  Synthesized
  misc_feature (36)..(36): n=C/T
ttaatattagatgatttaactcactcctatccctcncaatcatctctatcccaacaagcttcgaagggatt

SEQ ID NO: 713 - DNA, 71 bp, artificial sequence
  Synthesized
  misc_feature (36)..(36): n=A/C
agcaacttgtcattggcaaggatgatgtgaccattntggttcttagactaagccctcgtgtgcttcttgaa

SEQ ID NO: 714 - DNA, 71 bp, artificial sequence
  Synthesized
  misc_feature (36)..(36): n=C/T
tacttatcatgcttcatttgtaaactgaacattgtngttttaaataattctatcacttctacatgtatgta

SEQ ID NO: 715 - DNA, 71 bp, artificial sequence
  Synthesized
  misc_feature (36)..(36): n=A/G
tgtgcaccctaatattctagcaatggtgactaggcntattaacaaatatataaagcactatctctggaggg

SEQ ID NO: 716 - DNA, 71 bp, artificial sequence
  Synthesized
  misc_feature (36)..(36): n=A/C
gatgcattttaattgttgaaagggtcatgatgcctnaaaagagggtgaattaggcttatctaaagtttctt

SEQ ID NO: 717 - DNA, 71 bp, artificial sequence
  Synthesized
  misc_feature (36)..(36): n=C/T
ctattgcaggttgctgactgctatagagtacatganatccattttttccccaacggtattaatcaacactt

SEQ ID NO: 718 - DNA, 71 bp, artificial sequence
  Synthesized
  misc_feature (36)..(36): n=G/T
cgattttggagaggagtggcactgctgccacatcanatagggagtggtacgacctaggatgctcgaagact

SEQ ID NO: 719 - DNA, 71 bp, artificial sequence
  Synthesized
  misc_feature (36)..(36): n=C/T
tgcattctggccacaactcgatctagggatgaatgnggccatcgacagatgggatctcgaggcaatggagg

SEQ ID NO: 720 - DNA, 71 bp, artificial sequence
  Synthesized
  misc_feature (36)..(36): n=C/T
cgaggaattcgtcatggaggaggataatgaggagtnccccgcggatcggtgcgtcgacagggtcctagagg

SEQ ID NO: 721 - DNA, 71 bp, artificial sequence
  Synthesized
  misc_feature (36)..(36): n=A/G
gatgtctctggaagagttcatcagtaccaattcatngtgaacatattcatttggtatatgctaatacgcta

SEQ ID NO: 722 - DNA, 71 bp, artificial sequence
  Synthesized
  misc_feature (36)..(36): n=C/T
gggagatgcagtcatagctcgttcgaggccaccatngggcgggagacgcagtatcttatgactgatattta

SEQ ID NO: 723 - DNA, 71 bp, artificial sequence
  Synthesized
  misc_feature (36)..(36): n=C/T
gtgcgtccactctaacaacaacctacaagaacccantatatgtattatggggatatctaaaatgcttgcaa

SEQ ID NO: 724 - DNA, 71 bp, artificial sequence
  Synthesized
  misc_feature (36)..(36): n=A/G
gattggttgctccacccaatacatccaggcccaccncgttcagttgaccgtgcagtgcatgtgaatggtta

SEQ ID NO: 725 - DNA, 71 bp, artificial sequence
  Synthesized
  misc_feature (36)..(36): n=C/T
tctagaacgactgctactgtattttggcagatgtgngttgcatattgctactgtattttggaggagatttt

SEQ ID NO: 726 - DNA, 71 bp, artificial sequence
  Synthesized
  misc_feature (36)..(36): n=C/T
ttcaacaggacacgatgggcctgagcgcacctggcngagtaaccaatcacgcctaaagcttccaaaaatgt

SEQ ID NO: 727 - DNA, 71 bp, artificial sequence
  Synthesized
  misc_feature (36)..(36): n=C/T
ttaccttcatttaagcagatcaccttttgccagaancattccagaacaagtagaccggaaaccggattaag

SEQ ID NO: 728 - DNA, 71 bp, artificial sequence
  Synthesized
  misc_feature (36)..(36): n=A/G
gactagccgagaaggaaatggaacgtggccgactanccgaaaatgcgtcgtggccgcccgcaccgggaaga

SEQ ID NO: 729 - DNA, 71 bp, artificial sequence
  Synthesized
  misc_feature (36)..(36): n=C/T
catgataatttaagtaggtggtggaatgactttaanatagggaagaggagctggcatccaagtgatgtcgt

SEQ ID NO: 730 - DNA, 71 bp, artificial sequence
  Synthesized
  misc_feature (36)..(36): n=A/G
tggtctaactcttcatcgatgcatctaacggccacnagctcatcacgattttgcttgaactcaacgtaaga

SEQ ID NO: 731 - DNA, 71 bp, artificial sequence
  Synthesized
  misc_feature (36)..(36): n=C/T
ctggatcggattatatatcgtctcggcagctagggnggccagcaccagccatgactccttcgcttctcctc

SEQ ID NO: 732 - DNA, 71 bp, artificial sequence
  Synthesized
  misc_feature (36)..(36): n=C/T
ctggagtcggttgataattacaggcacattgactgncccctttacctttctgcaggcgaggtcgtactcct

SEQ ID NO: 733 - DNA, 71 bp, artificial sequence
  Synthesized
  misc_feature (36)..(36): n=C/T
caaggttaaaccctatccatttattctaccccaacnacaagtccacgactagcaccaaggtgtgagaccca

SEQ ID NO: 734 - DNA, 71 bp, artificial sequence
  Synthesized
  misc_feature (36)..(36): n=C/T
cccgatgatcctgaggttctgtgaatagttgttaangctgtgttctgatttcaggatgtacttttgccgga

SEQ ID NO: 735 - DNA, 71 bp, artificial sequence
  Synthesized
  misc_feature (36)..(36): n=C/T
cttaagcaacttgcattttttttatgttgatctaangatgcaaagattttctgcatgcttagaggggaaag

SEQ ID NO: 736 - DNA, 71 bp, artificial sequence
  Synthesized
  misc_feature (36)..(36): n=A/G
tagcagcttacgtttacttgtataagcaaatgagangcaccaacaaaccaaagtaagtctgaatatataag

SEQ ID NO: 737 - DNA, 71 bp, artificial sequence
  Synthesized
  misc_feature (36)..(36): n=A/C
tcttatctcacttaaagttagttgaaaaaaatgctnagataatgtgtcaaaaaggtgaaagcccatttttt

SEQ ID NO: 738 - DNA, 71 bp, artificial sequence
  Synthesized
  misc_feature (36)..(36): n=A/G
cagtcgctgggggcagtggtatgagggtaaggaggnagttggatgattcagtggtgtcatgctatgattct

SEQ ID NO: 739 - DNA, 71 bp, artificial sequence
  Synthesized
  misc_feature (36)..(36): n=C/T
ttctgtcgcgggagctatccgtgcaagttcgtgcangatgaacggcgcaccgaattcacgagacagctagc

SEQ ID NO: 740 - DNA, 71 bp, artificial sequence
  Synthesized
  misc_feature (36)..(36): n=A/G
ctgcacgagtttgaggcagaggctgcttctcccccncaattggcgtggcaaggcggaggcggcatgttgtc

SEQ ID NO: 741 - DNA, 71 bp, artificial sequence
  Synthesized
  misc_feature (36)..(36): n=A/G
cgacgtacagaaaattacaaaagagatgtttatctntgagtcgaaactacctaggagaatatttcgccagt

SEQ ID NO: 742 - DNA, 71 bp, artificial sequence
  Synthesized
  misc_feature (36)..(36): n=C/T
aagaatcgcattatttgtcacatttacgtgtggagnctgagtggcccatatggcagacaatacatcgggcc

SEQ ID NO: 743 - DNA, 71 bp, artificial sequence
  Synthesized
  misc_feature (36)..(36): n=A/G
gagaggagagatcgcgcagaactttcggatcgatcnggcgctcaccttggtgacgtactccatctcggcga

SEQ ID NO: 744 - DNA, 71 bp, artificial sequence
  Synthesized
  misc_feature (36)..(36): n=C/T
catcgtactgctccaccacttacccatacttttttngctctaagtatcttctggccagtaaattacctcag

SEQ ID NO: 745 - DNA, 71 bp, artificial sequence
  Synthesized
  misc_feature (36)..(36): n=C/T
aactgagaagtatggcttttatgattgatccttgantccactatgctaacccaacaagtgcctagtaaatt

SEQ ID NO: 746 - DNA, 71 bp, artificial sequence
  Synthesized
  misc_feature (36)..(36): n=C/T
gctcgcgattgacttgcaacatccgagtccaacagngatggagcctgaaaaaattaggaccaaaccgttac

SEQ ID NO: 747 - DNA, 71 bp, artificial sequence
  Synthesized
  misc_feature (36)..(36): n=C/T
acgacttgttcagtttattttacgcgcgtgggtttngggtccccctaaccttgtttgtttcgtggattttg

SEQ ID NO: 748 - DNA, 71 bp, artificial sequence
  Synthesized
  misc_feature (36)..(36): n=A/C
gaccgtgtcccgtttaattatttgtcccattccaanctatgtgtgaacaacacaaatataaaggaaggaca

SEQ ID NO: 749 - DNA, 71 bp, artificial sequence
  Synthesized
  misc_feature (36)..(36): n=A/G
tttcagaggccgggtttcctggcaggatactggaantagcggacccgaacctatgggcacacctccctgac

SEQ ID NO: 750 - DNA, 71 bp, artificial sequence
  Synthesized
  misc_feature (36)..(36): n=C/T
ctctctatttcctcgcccagttctaagatctgaagncgtagagggtttcaggcgacaaccgcatcccacag

SEQ ID NO: 751 - DNA, 71 bp, artificial sequence
  Synthesized
  misc_feature (36)..(36): n=A/G
cattgtcctcacacgagcacatggatgatcacacancttagcacagatgtcttgtgagtgaaaacagcagt

SEQ ID NO: 752 - DNA, 71 bp, artificial sequence
  Synthesized
  misc_feature (36)..(36): n=A/G
tggagacttgagagtaagatgggcccacgtgtcagnaaccccccatcatgcctacccactgctgcataaat

SEQ ID NO: 753 - DNA, 71 bp, artificial sequence
  Synthesized
  misc_feature (36)..(36): n=G/T
ggcacaagatactttgtgtcaactacttgcgatttngtgcaagactagcacaggaacatggagtttcttca

SEQ ID NO: 754 - DNA, 71 bp, artificial sequence
  Synthesized
  misc_feature (36)..(36): n=A/C
acagtgacatcaagcatcagacagggaaccagtganaaacaatgtacaacctacaatggctaggctagcga

SEQ ID NO: 755 - DNA, 71 bp, artificial sequence
  Synthesized
  misc_feature (36)..(36): n=A/G
aacaatcattccctaacagaccgaaaaggaagaacnttgcagccctctctcaaaatttgttgctactttac

SEQ ID NO: 756 - DNA, 71 bp, artificial sequence
  Synthesized
  misc_feature (36)..(36): n=C/T
attgttgcgttgtcatgggcactattgcagtcgacngttgcgctggtagccgttactctgctggggcaccg

SEQ ID NO: 757 - DNA, 71 bp, artificial sequence
  Synthesized
  misc_feature (36)..(36): n=C/T
gttaaaagaagcccgacccttttttatgcctcgttnggtcgctcatcattctttagctaacgaggtggtat

SEQ ID NO: 758 - DNA, 71 bp, artificial sequence
  Synthesized
  misc_feature (36)..(36): n=A/G
ggacgaaaccctagcggtaataccgaagctgtaagnattttctaattggcagttattgcggggtctgttgt

SEQ ID NO: 759 - DNA, 71 bp, artificial sequence
  Synthesized
  misc_feature (36)..(36): n=A/G
ctggccttgtttcggtatgcatatgcatcgtgggtngtacggttggctttctgacagcgagatgaagctgc

SEQ ID NO: 760 - DNA, 71 bp, artificial sequence
  Synthesized
  misc_feature (36)..(36): n=G/T
ataatcaaattttttaatcatttgaactgtggctgnttgaatacttgaatctgttaattactttatgaata

SEQ ID NO: 761 - DNA, 71 bp, artificial sequence
  Synthesized
  misc_feature (36)..(36): n=A/G
gtaatcaatgtaaatgtagaagctaaagagcagacntagagattgcaaacccttgtggatgcactgatatt

SEQ ID NO: 762 - DNA, 71 bp, artificial sequence
  Synthesized
  misc_feature (36)..(36): n=A/G
ttatgtgtttagtatttaaatgcttctccaactgtngctattgaaaatttagttttgttctaaccaaaaat

SEQ ID NO: 763 - DNA, 71 bp, artificial sequence
  Synthesized
  misc_feature (36)..(36): n=C/T
cataacagtgttatctcagcccataaaagacgttcntagtcttacaccattgcctcttttattatcgattg

SEQ ID NO: 764 - DNA, 71 bp, artificial sequence
  Synthesized
  misc_feature (36)..(36): n=C/G
ttgctgaagaaaatgtcttcattgagatcaggtaantcagcagttcctgcattttttcctactcagttact

SEQ ID NO: 765 - DNA, 71 bp, artificial sequence
  Synthesized
  misc_feature (36)..(36): n=A/G
ggaagcttctcgctggggagagccgggacaagctanagcgacggacatgggtcaccagtaagccacggtca

SEQ ID NO: 766 - DNA, 71 bp, artificial sequence
  Synthesized
  misc_feature (36)..(36): n=C/T
gcacgcttgcacctagggactgcttgcataacagtngttgcactatattctgatgcgaagatttttttttc

SEQ ID NO: 767 - DNA, 71 bp, artificial sequence
  Synthesized
  misc_feature (36)..(36): n=C/T
ggagttgtcatgggagttggaaccacctccgaactnaggtgagcgattccgagagtttcgtatcgaatctg

SEQ ID NO: 768 - DNA, 71 bp, artificial sequence
  Synthesized
  misc_feature (36)..(36): n=A/C
atgttcgcataacgatagctacagagcaacaacaanaaaaaaacgttccgatacattggcttgatgtcatc

SEQ ID NO: 769 - DNA, 71 bp, artificial sequence
  Synthesized
  misc_feature (36)..(36): n=G/T
agcaagccatcaactggcttagtgaccatactttgnaactccttcaaaggtgaggaaatttcacaagatac

SEQ ID NO: 770 - DNA, 71 bp, artificial sequence
  Synthesized
  misc_feature (36)..(36): n=A/G
ggagatatgtaatattaagtggatagaagtgtttcnacaattgtcaaaattgcttgaccgctcgatcaatc

SEQ ID NO: 771 - DNA, 71 bp, artificial sequence
  Synthesized
  misc_feature (36)..(36): n=G/T
cacggcgacgaggtaccactccgttttcgtaccatnggcaatatcatcggtgcatcttccctgtctgggta

SEQ ID NO: 772 - DNA, 71 bp, artificial sequence
  Synthesized
  misc_feature (36)..(36): n=C/T
ttggatcttttgggcgtctggacacccaggcgacgnctttaaaacactagccatagcgatagatacacaca

SEQ ID NO: 773 - DNA, 71 bp, artificial sequence
  Synthesized
  misc_feature (36)..(36): n=A/G
cattttgtgatctgttttaacttctatccttctttngcgaggttgatatatcccttctcagtcttggtgtc

SEQ ID NO: 774 - DNA, 71 bp, artificial sequence
  Synthesized
  misc_feature (36)..(36): n=A/T
ttttcggataacataaggttggttctgcaaagtctngggcttcgttgtaattaattattaccaataaacta

SEQ ID NO: 775 - DNA, 71 bp, artificial sequence
  Synthesized
  misc_feature (36)..(36): n=A/G
ttaggacggagggactagaaggaaagatatattganagaagacaaatgtctattaaaaataataatgataa

SEQ ID NO: 776 - DNA, 71 bp, artificial sequence
  Synthesized
  misc_feature (36)..(36): n=A/G
gcaaaagccagaggccgagctcaccaaaatgagctnctcgttggggaattaaaaaaatgagaggagtagat

SEQ ID NO: 777 - DNA, 71 bp, artificial sequence
  Synthesized
  misc_feature (36)..(36): n=A/G
taggaatgaacgaaaatgacgtgtgtagtacgtgcngtgcttgaatacgatatgggaacaaaatccaactt

SEQ ID NO: 778 - DNA, 71 bp, artificial sequence
  Synthesized
  misc_feature (36)..(36): n=G/T
gctcacttatgctagagccattattatagtccccantaacaattcttttgattgtggttccagcatatacc

SEQ ID NO: 779 - DNA, 71 bp, artificial sequence
  Synthesized
  misc_feature (36)..(36): n=C/T
gagtgaataaagtattaaaaacacctatagatatcnactatacatacaaaattgcaaagtatttacattag

SEQ ID NO: 780 - DNA, 71 bp, artificial sequence
  Synthesized
  misc_feature (36)..(36): n=A/G
ttatctgcgtcgagggtccttgaatcgtggctggcnaagtcctttgtcttggcgcttgtcccgtgcatggg

SEQ ID NO: 781 - DNA, 71 bp, artificial sequence
  Synthesized
  misc_feature (36)..(36): n=A/G
aacccaagtagccgcgccgtcgtggatggagagacnagggtgcggttcatgaatcatgagtcctgctcctg

SEQ ID NO: 782 - DNA, 71 bp, artificial sequence
  Synthesized
  misc_feature (36)..(36): n=C/T
aattttacatattggtcattcctccattaatactgntgatcgctcacttgctttgtgtcacgttcttcatg

SEQ ID NO: 783 - DNA, 71 bp, artificial sequence
  Synthesized
  misc_feature (36)..(36): n=C/T
gtcgaggtatcactacatgtatcggaaccgtcaggnggtctcttgtgtaaatatgcgctgaataagatgtg

SEQ ID NO: 784 - DNA, 71 bp, artificial sequence
  Synthesized
  misc_feature (36)..(36): n=C/T
actagttttgtaaagtttatatgcaggcaaggaagnagggagtgtgctttctagcatttacggttttgaaa

SEQ ID NO: 785 - DNA, 71 bp, artificial sequence
  Synthesized
  misc_feature (36)..(36): n=A/C
attagatggggcaagagagtaggatgctaggagatntacgtgaagaccaagggaagatatatgaccattgc

SEQ ID NO: 786 - DNA, 71 bp, artificial sequence
  Synthesized
  misc_feature (36)..(36): n=A/G
ttttccttaagaagttttttcccatactaaacactntgtcaaccactacgatatggacaacccctccccag

SEQ ID NO: 787 - DNA, 71 bp, artificial sequence
  Synthesized
  misc_feature (36)..(36): n=C/T
gtattgggttttagtgatcgagtgcatatgtaagcnggatacagggaaaagaaatgaacagcatagagagc

SEQ ID NO: 788 - DNA, 71 bp, artificial sequence
  Synthesized
  misc_feature (36)..(36): n=A/G
aacgttatccacagatctcagccgtccgatctaatnccgacgctccagattaaatcatcactctcgcgaac

SEQ ID NO: 789 - DNA, 71 bp, artificial sequence
  Synthesized
  misc_feature (36)..(36): n=A/G
gggatgttcacagctccttcagggtggccggcgctnaactcgccctccgttctacacacagaccaaatcga

SEQ ID NO: 790 - DNA, 71 bp, artificial sequence
  Synthesized
  misc_feature (36)..(36): n=C/T
cactatccgagcatctgagtgtttgcgagattgtgngattatgtggtgctaataatataggtgttgatgcc

SEQ ID NO: 791 - DNA, 71 bp, artificial sequence
  Synthesized
  misc_feature (36)..(36): n=A/G
ttgacttgtgataacctggtggtgataggaaagttnggagcagcatgggtactgttgctggtatggcaagc

SEQ ID NO: 792 - DNA, 71 bp, artificial sequence
  Synthesized
  misc_feature (36)..(36): n=A/C
tggatgaagtcgtctaatcactagaacatcatgctnagttgttttgaatattgaatataaattgtacatat

SEQ ID NO: 793 - DNA, 71 bp, artificial sequence
  Synthesized
  misc_feature (36)..(36): n=C/T
caaatttttcaatcattttgcttccagattgaaacnccgaaggatgtccaacagaagtttgggcgtactgt

SEQ ID NO: 794 - DNA, 71 bp, artificial sequence
  Synthesized
  misc_feature (36)..(36): n=A/G
aaaattaagttttggtgcagctgcaggtcagtaatnagtcctgggatgtaaaggcaactaaaataaactaa

SEQ ID NO: 795 - DNA, 71 bp, artificial sequence
  Synthesized
  misc_feature (36)..(36): n=A/G
ctctactacatggcaacagtgatgtggctgaccctnaaaatcatgctgttttttaatcatatcctagccaa

SEQ ID NO: 796 - DNA, 71 bp, artificial sequence
  Synthesized
  misc_feature (36)..(36): n=C/G
tgagtggttcatgtattaccaacctagggagggctnatgcataatcatgaatgaaatgcatgagttaccca

SEQ ID NO: 797 - DNA, 71 bp, artificial sequence
  Synthesized
  misc_feature (36)..(36): n=G/T
tcactattaatttaaatggttttcttcatccatatnttcttgtatcttattcctaggtgagaatcattaac

SEQ ID NO: 798 - DNA, 71 bp, artificial sequence
  Synthesized
  misc_feature (36)..(36): n=A/G
gtctagttcaaagacagaaacagcagcatcacatgnccaagttcttatgagaagtaccaaaaataagcagg

SEQ ID NO: 799 - DNA, 71 bp, artificial sequence
  Synthesized
  misc_feature (36)..(36): n=A/G
gatgacctaagatgaggtactcgatatgctacattnaactgtgttcgatatggtggtgaagcttgcctcag

SEQ ID NO: 800 - DNA, 71 bp, artificial sequence
  Synthesized
  misc_feature (36)..(36): n=A/C
tcattgtaaccgtgtgctgacgaagtgacgaacacnctgctcactgcaattgctgcaggaggctctttcag

SEQ ID NO: 801 - DNA, 71 bp, artificial sequence
  Synthesized
  misc_feature (36)..(36): n=C/T
ccacatgtgatccccatcaacgcatgctcgctcggncgctccctttcaaattgcaagccaagccgtctcaa

SEQ ID NO: 802 - DNA, 71 bp, artificial sequence
  Synthesized
  misc_feature (36)..(36): n=C/T
cactttgaaatggctctttccgcggcaaagtacgangcaaaactagcagttgcgggcaaggaaaagggatc

SEQ ID NO: 803 - DNA, 71 bp, artificial sequence
  Synthesized
  misc_feature (36)..(36): n=A/G
acctcttgttaatttttttctaaaatatcactacantgaagcattccataaagaatttatagggtccgtag

SEQ ID NO: 804 - DNA, 71 bp, artificial sequence
  Synthesized
  misc_feature (36)..(36): n=C/T
cttgcctttggaatccctctagactgggttgctggntggccccaatacgggttgggccttgtcacgaacca

SEQ ID NO: 805 - DNA, 71 bp, artificial sequence
  Synthesized
  misc_feature (36)..(36): n=C/T
ttattaagctttgggccaatatatcacaatccaaanagaccaggatatcacaatccaaacagaccaggata

SEQ ID NO: 806 - DNA, 71 bp, artificial sequence
  Synthesized
  misc_feature (36)..(36): n=A/C
tataaatacacccagttaccatgtcgctctccatancctcaacaccctgagccaaggcaaatccccaccca

SEQ ID NO: 807 - DNA, 71 bp, artificial sequence
  Synthesized
  misc_feature (36)..(36): n=C/T
atacgctctctctattccaaaacaaggcatttgagnttttttaggtacatagtttttctatacatctaggg

SEQ ID NO: 808 - DNA, 71 bp, artificial sequence
  Synthesized
  misc_feature (36)..(36): n=C/T
taaattccaacatctaaatacctccaaacagtccanaagataccccctgcattctgtttttggacagcaac

SEQ ID NO: 809 - DNA, 71 bp, artificial sequence
  Synthesized
  misc_feature (36)..(36): n=A/G
gagattgtgagcaagtggactggtattccagtgtcnaaccttcaacagtctgaaagggaaaagctgctgct

SEQ ID NO: 810 - DNA, 71 bp, artificial sequence
  Synthesized
  misc_feature (36)..(36): n=A/G
gacattacgcttttcaaactgatttctacccactgngaaaggttctatggcccccgacggagagattctca

SEQ ID NO: 811 - DNA, 71 bp, artificial sequence
  Synthesized
  misc_feature (36)..(36): n=A/G
atttaaaatgataaacacgacacagagggagcttcntcaagatagtccaagcaatggcgaggactggtatg

SEQ ID NO: 812 - DNA, 71 bp, artificial sequence
  Synthesized
  misc_feature (36)..(36): n=A/G
gtttatacaattctaactaacagtgtcgcagctctnacaataatcaatgtagttgctgccctcagttctcg

SEQ ID NO: 813 - DNA, 71 bp, artificial sequence
  Synthesized
  misc_feature (36)..(36): n=C/T
aggctccttcatcaacgtctgccgtgtgatgtcgcnaaagcctctgcaccatcaccggagaaagccctcag

SEQ ID NO: 814 - DNA, 71 bp, artificial sequence
  Synthesized
  misc_feature (36)..(36): n=A/G
tcacctgcgatcgctcatttgtaaagaacaattcgnttattaagctggagtattgtttttctcggacaaca

SEQ ID NO: 815 - DNA, 71 bp, artificial sequence
  Synthesized
  misc_feature (36)..(36): n=C/T
atggcccataatttattactcaaaacctaatccaanccgacatgtccaacagttaagcacgagccaaccta

SEQ ID NO: 816 - DNA, 71 bp, artificial sequence
  Synthesized
  misc_feature (36)..(36): n=A/G
tatgagctgtaaaaagctgagagctgtggcggtggnagtcacagacgagcggacgccgcaattgccgattg

SEQ ID NO: 817 - DNA, 71 bp, artificial sequence
  Synthesized
  misc_feature (36)..(36): n=C/T
tggacttaagtttttttatggttccgctgtttcctntcgatctagctcttcgcctacctttttcttggctt

SEQ ID NO: 818 - DNA, 71 bp, artificial sequence
  Synthesized
  misc_feature (36)..(36): n=C/T
atagggcctgaatgtagtccttttagagttttgacnttcgtctctgccacaatggagcccttctcttgata

SEQ ID NO: 819 - DNA, 71 bp, artificial sequence
  Synthesized
  misc_feature (36)..(36): n=C/T
ttctcgatagtcggcctatgtccaattacgtagtcngaatccgcattctccagcggaatctctgtactgcc

SEQ ID NO: 820 - DNA, 71 bp, artificial sequence
  Synthesized
  misc_feature (36)..(36): n=A/C
ggttctagaactctttgatgttatgaaacgttactntattctcatgatatcgatcttatggattaactatt

SEQ ID NO: 821 - DNA, 71 bp, artificial sequence
  Synthesized
  misc_feature (36)..(36): n=C/T
ttgcatgttcgctggaatttttcctaaggacggtcngcccccaaactcagcccagacggtccgcaatacaa

SEQ ID NO: 822 - DNA, 71 bp, artificial sequence
  Synthesized
  misc_feature (36)..(36): n=A/G
aaatcatttctcgaaaaaaaaattgtttgctgatanagcttcttctaaattcagcgcgaaagcttctaatg

SEQ ID NO: 823 - DNA, 71 bp, artificial sequence
  Synthesized
  misc_feature (36)..(36): n=C/T
gaaattgcttcccatggtgtcgttgtttggactagnggttctaaccaactagtgaaatgatgtcgcgtgct

SEQ ID NO: 824 - DNA, 71 bp, artificial sequence
  Synthesized
  misc_feature (36)..(36): n=C/G
gggaaaaggaacatttctcctgtctaatcaacgtgntcgagcgaagagataagatctttcacattgaaaat

SEQ ID NO: 825 - DNA, 71 bp, artificial sequence
  Synthesized
  misc_feature (36)..(36): n=C/T
ataagatttgatggttacttcggagtcagatgaacntgtactcgttatttatatttgaagatttatatcga

SEQ ID NO: 826 - DNA, 71 bp, artificial sequence
  Synthesized
  misc_feature (36)..(36): n=A/C
gctcccgcgcaaccaccaacatagctgagggagatngcgtgagcgaggcaggggcatcggtgttcgtctag

SEQ ID NO: 827 - DNA, 71 bp, artificial sequence
  Synthesized
  misc_feature (36)..(36): n=C/T
cttccctcggccgtcgaaggctgcagacaaagcatnatctttggccttgctatatgccccgagtagttcgt

SEQ ID NO: 828 - DNA, 71 bp, artificial sequence
  Synthesized
  misc_feature (36)..(36): n=C/T
tccctagttgtgtgtctttaaaaaaggatttttttnctgtttgagcttaagcctctctgataaggcataca

SEQ ID NO: 829 - DNA, 71 bp, artificial sequence
  Synthesized
  misc_feature (36)..(36): n=A/C
tattgatctttagtaataggttgtgatgaagtagcntacatctcctttggaacccaaaattttgtggtgtt

SEQ ID NO: 830 - DNA, 71 bp, artificial sequence
  Synthesized
  misc_feature (36)..(36): n=A/G
caaggtggagatataggggaggagattttgttgtcntgtcgagatagtggggcataggggaagaaatatag

SEQ ID NO: 831 - DNA, 71 bp, artificial sequence
  Synthesized
  misc_feature (36)..(36): n=C/T
ttggcgcatgcagtggaaactaatcccaagatctanagacacaactatttaaagtgcgcactgatcgagtg

SEQ ID NO: 832 - DNA, 71 bp, artificial sequence
  Synthesized
  misc_feature (36)..(36): n=A/C
cttgttgatgtgtggaacataggaaaaaatgaggcnaaaagtggatttatataacaacaacctacaaagta

SEQ ID NO: 833 - DNA, 71 bp, artificial sequence
  Synthesized
  misc_feature (36)..(36): n=C/G
taggattggaaacaaaagtctagctgccacagcagngatgtcgttcggcctgcagaacccactcaacgaag

SEQ ID NO: 834 - DNA, 71 bp, artificial sequence
  Synthesized
  misc_feature (36)..(36): n=G/T
ttctgaattgtttcagtacacgtacaagtgtgtttntataacttgttattcagtttgtgtagtgtgctcac

SEQ ID NO: 835 - DNA, 71 bp, artificial sequence
  Synthesized
  misc_feature (36)..(36): n=C/T
tccggtagccgtcgccaggctgctgtgagtgtgacngaccttcgacctcgatcgctaagtggttgcggtat

SEQ ID NO: 836 - DNA, 71 bp, artificial sequence
  Synthesized
  misc_feature (36)..(36): n=A/C
ggctctaacgaggacttaggagaagcctaagattcntgatacctcgataaaataccaaagtcattgacgag

SEQ ID NO: 837 - DNA, 71 bp, artificial sequence
  Synthesized
  misc_feature (36)..(36): n=C/T
cgtcattgtcctgctaatttcgtagcgttcattgtntttgtattcatatgttagcacacatgcttcttcag

SEQ ID NO: 838 - DNA, 71 bp, artificial sequence
  Synthesized
  misc_feature (36)..(36): n=C/T
ttggtcggctactctggtcctctggtatccaagcgncagactcagatccctgcagccacagcccgtgtgtc

SEQ ID NO: 839 - DNA, 71 bp, artificial sequence
  Synthesized
  misc_feature (36)..(36): n=G/T
ggcagtaatgtactggtttccatctagctacgttangcatttactgctcaagtcattcatgcttttactca

SEQ ID NO: 840 - DNA, 71 bp, artificial sequence
  Synthesized
  misc_feature (36)..(36): n=C/T
gcaatgcaaatcgatggtccaaagaatttactaganaagagatagaatatattagatttcttatgttgtcc

SEQ ID NO: 841 - DNA, 71 bp, artificial sequence
  Synthesized
  misc_feature (36)..(36): n=A/C
ctatatgctggctggaggaatttgtgattgatgccnatctgatcaaagttatgttagaaagttatgtcggc

SEQ ID NO: 842 - DNA, 71 bp, artificial sequence
  Synthesized
  misc_feature (36)..(36): n=A/G
tttctatgatccaccttttgataaatttgacacatnaagatcaatgcattacatagataattatgtgtcac

SEQ ID NO: 843 - DNA, 71 bp, artificial sequence
  Synthesized
  misc_feature (36)..(36): n=A/G
agcacttgccttgtgcactgtagttagtctgttgcntcatagccgcatcgaccatagctatacatgtatcg

SEQ ID NO: 844 - DNA, 71 bp, artificial sequence
  Synthesized
  misc_feature (36)..(36): n=A/C
tttagagctccagttcatgactgcatcaatggttcntcgttaaactttgatttatgggtagcattggtcta

SEQ ID NO: 845 - DNA, 71 bp, artificial sequence
  Synthesized
  misc_feature (36)..(36): n=C/T
aggtgtcagaacatgcgaggaaacctaagggtcagnacgttgttgtagtggatggctctcctccatcctag

SEQ ID NO: 846 - DNA, 71 bp, artificial sequence
  Synthesized
  misc_feature (36)..(36): n=A/G
tcgactgacttgggatccatagtcaccttctatganactctctgaaccctcaacctaaaaggagaaaaaaa

SEQ ID NO: 847 - DNA, 71 bp, artificial sequence
  Synthesized
  misc_feature (36)..(36): n=C/T
tgagaaatggactatcttcgcctgcagaggcatgtnataaaaaagtggcttacatgctggtccatttttaa

SEQ ID NO: 848 - DNA, 71 bp, artificial sequence
  Synthesized
  misc_feature (36)..(36): n=A/G
gctgccaatttggcgaacaagccagccgcagagacntttgcacgcgccacttcactcaaagatccatttat

SEQ ID NO: 849 - DNA, 71 bp, artificial sequence
  Synthesized
  misc_feature (36)..(36): n=C/T
gatcgtcctcattatctgccacctgattagcctcgncatctgccgtctgatctacaactgattgatctaac

SEQ ID NO: 850 - DNA, 71 bp, artificial sequence
  Synthesized
  misc_feature (36)..(36): n=A/G
atcctcttgttcctccctccgaaaccctggcaaaangagggaaggaaaaaaaaatgtttccaaatgcgatt

SEQ ID NO: 851 - DNA, 71 bp, artificial sequence
  Synthesized
  misc_feature (36)..(36): n=C/T
tgaacacatcagattccatatttttttgttttgtcncgttgacatagtgctttctttcttatgccagagaa

SEQ ID NO: 852 - DNA, 71 bp, artificial sequence
  Synthesized
  misc_feature (36)..(36): n=C/T
ccatgacatgtatatgcgggccgtagccctaaagtnctggacggcccataaatcccaggtcttgcccccag

SEQ ID NO: 853 - DNA, 71 bp, artificial sequence
  Synthesized
  misc_feature (36)..(36): n=A/C
atgcatgcacgccattaattcgtggcttctgccttntatttattcttcccatgggcatggcctccagagag

SEQ ID NO: 854 - DNA, 71 bp, artificial sequence
  Synthesized
  misc_feature (36)..(36): n=C/T
ccctcttgtacgtacacggcagttttaagtgagttntcttatccctgtgctatctgtaaatacatactttg

SEQ ID NO: 855 - DNA, 71 bp, artificial sequence
  Synthesized
  misc_feature (36)..(36): n=A/C
agcattatttctctaacgcattgttggagagaaganaggacggaacttcgataatcggcaaacttgacaca

SEQ ID NO: 856 - DNA, 71 bp, artificial sequence
  Synthesized
  misc_feature (36)..(36): n=A/C
aactaacccctagtgctagcgcacggtgtacgagancttggggtgctttctgcatgagcgtggactatctg

SEQ ID NO: 857 - DNA, 71 bp, artificial sequence
  Synthesized
  misc_feature (36)..(36): n=G/T
gacatttagccttgatggtggctatgtttttttttngtttatgcattacaacaagttgaaaattgatgatg

SEQ ID NO: 858 - DNA, 71 bp, artificial sequence
  Synthesized
  misc_feature (36)..(36): n=C/T
taaataaaaaggaatgaaatggcagcgcaatgcaangaccaccagttattcgaataaagactgcgtttggc

SEQ ID NO: 859 - DNA, 71 bp, artificial sequence
  Synthesized
  misc_feature (36)..(36): n=G/T
gtaacatctttgcctggaatgatataacaaaaaacntataaatgtgtgacctagaaattgtaaagaattat

SEQ ID NO: 860 - DNA, 71 bp, artificial sequence
  Synthesized
  misc_feature (36)..(36): n=C/T
cttatattaattggtggttccaaccaatactaatancccttcttagagcatctccaagagctctccataaa

SEQ ID NO: 861 - DNA, 71 bp, artificial sequence
  Synthesized
  misc_feature (36)..(36): n=A/C
tgctaggctggacagatcttccacaccaatagctantaatcattggaaaaagttgcaacagatctgcaatc

SEQ ID NO: 862 - DNA, 71 bp, artificial sequence
  Synthesized
  misc_feature (36)..(36): n=A/G
ctgcttttgtgaactttgtctagctgtatgtagacngtttatagttgtgttgtggcctgaacaggttgttt

SEQ ID NO: 863 - DNA, 71 bp, artificial sequence
  Synthesized
  misc_feature (36)..(36): n=A/G
cccactttccaccgcagtcactgcacgaacgcacangaccaaaacaatttgcatcaagaactgaactaagt

SEQ ID NO: 864 - DNA, 71 bp, artificial sequence
  Synthesized
  misc_feature (36)..(36): n=C/T
gcttgcgcctggtgtggtctgtggctagcttgctgncccaccggcacagcgtcgtacagacgatacagcta

SEQ ID NO: 865 - DNA, 71 bp, artificial sequence
  Synthesized
  misc_feature (36)..(36): n=A/G
agcgacacgtaatgcaaatagcaacataaacacacnatctcatttgatattttttatgttaagaggctagg

SEQ ID NO: 866 - DNA, 71 bp, artificial sequence
  Synthesized
  misc_feature (36)..(36): n=A/G
caacttctctatcaatgatgctactacttggtgggnctcgctatagttagcgactatgacttccctcttct

SEQ ID NO: 867 - DNA, 71 bp, artificial sequence
  Synthesized
  misc_feature (36)..(36): n=A/G
tactaataatttccataatgaacaaggtaaaacatngatgggtgcaattgagcagatcacaaatccagcag

SEQ ID NO: 868 - DNA, 71 bp, artificial sequence
  Synthesized
  misc_feature (36)..(36): n=A/G
acttgcgtttgtaaggtgatagatgcctagaaattngaaatgaaagcaactgtagctattagctaggtaac

SEQ ID NO: 869 - DNA, 71 bp, artificial sequence
  Synthesized
  misc_feature (36)..(36): n=G/T
agctaggtagctagcgacgacctagcgtatgtaggnagggagggtcgcggctggagctggattgcgaggcg

SEQ ID NO: 870 - DNA, 71 bp, artificial sequence
  Synthesized
  misc_feature (36)..(36): n=C/T
agcataatgcaaggtcccttggacgatggaggcgangacgttaacattgtctctaacgctcgcgatatata

SEQ ID NO: 871 - DNA, 71 bp, artificial sequence
  Synthesized
  misc_feature (36)..(36): n=C/T
agggagaccctgattggcacggacggccaccgccgnaaccaatcattcctcggcctcccaaaccttcatcc

SEQ ID NO: 872 - DNA, 71 bp, artificial sequence
  Synthesized
  misc_feature (36)..(36): n=G/T
aatggaaagaaatgaggtagtgggaccaccatagangcatcaaccgaccatgcttatggatccaccagcct

SEQ ID NO: 873 - DNA, 71 bp, artificial sequence
  Synthesized
  misc_feature (36)..(36): n=C/T
ggatggcttaacatatgataatagtaccatgtgganagctgactgcaggtgcaaaagcatggtgtttattg

SEQ ID NO: 874 - DNA, 71 bp, artificial sequence
  Synthesized
  misc_feature (36)..(36): n=C/T
ggtacgtccgttaagaaccctcgagcacctacaatngacccaatcaatctacatatcatttcctttacttt

SEQ ID NO: 875 - DNA, 71 bp, artificial sequence
  Synthesized
  misc_feature (36)..(36): n=C/T
tatacgacacggattgctgactgcaacttgcaccgntaaacaaggctagcttgacatggtagtatccggca

SEQ ID NO: 876 - DNA, 71 bp, artificial sequence
  Synthesized
  misc_feature (36)..(36): n=A/G
tcgtttctaaggaaactcagaagcacaagtggctcnaattaatgatcctcatgtctcaccaaatccttcac

SEQ ID NO: 877 - DNA, 71 bp, artificial sequence
  Synthesized
  misc_feature (36)..(36): n=C/T
tggctataggtgtcggaccgattctctttcccgctncttcatgccagttgtggtcatgcagcctgtacttg

SEQ ID NO: 878 - DNA, 71 bp, artificial sequence
  Synthesized
  misc_feature (36)..(36): n=A/C
catgagtaagatcgtaaccgacaaaccgtgacattnctggcggtttcaacaaacacaacaggacaattcaa

SEQ ID NO: 879 - DNA, 71 bp, artificial sequence
  Synthesized
  misc_feature (36)..(36): n=A/G
gggagcttcacgttatgggaaagcaaaggtagagtngttggctacatctatgaacaatcaatgttaatcat

SEQ ID NO: 880 - DNA, 71 bp, artificial sequence
  Synthesized
  misc_feature (36)..(36): n=A/G
attctgctgtaacttatgtcacgggtcgtcctctcngatatgccggataaaaggcttatgtgcgccaccaa

SEQ ID NO: 881 - DNA, 71 bp, artificial sequence
  Synthesized
  misc_feature (36)..(36): n=C/T
acggtgctatgatagaacaggtaggattatccccgngtctactttgatgataccgcgtgccaaatcacgga

SEQ ID NO: 882 - DNA, 71 bp, artificial sequence
  Synthesized
  misc_feature (36)..(36): n=C/T
actgtacctagcagtacttttacggcacccaaaatntgcgcaaacccgattcgcgtgtgtggacagttttc

SEQ ID NO: 883 - DNA, 71 bp, artificial sequence
  Synthesized
  misc_feature (36)..(36): n=C/T
tctagtggaattggaatacagcaccaggcagcagcngaactcaacttggagccgattgcatagattagcaa

SEQ ID NO: 884 - DNA, 71 bp, artificial sequence
  Synthesized
  misc_feature (36)..(36): n=A/C
taatataactgaagatagttcagttaagaagtttgnctgctcatagcagacattaaggaaaatacctgttc

SEQ ID NO: 885 - DNA, 71 bp, artificial sequence
  Synthesized
  misc_feature (36)..(36): n=C/T
agaattgatgggtgcagtgcagagtgcagacgatangagtgtgagcacacaattaagtttgcatgggagaa

SEQ ID NO: 886 - DNA, 71 bp, artificial sequence
  Synthesized
  misc_feature (36)..(36): n=C/T
acaaagcataggtactacacaatcgacctacacgcngaatgagcccactagcccatatatgcctccacaat

SEQ ID NO: 887 - DNA, 71 bp, artificial sequence
  Synthesized
  misc_feature (36)..(36): n=A/C
aaacctaaacacaccgcaaaaaaggtatcaagcatnaaaaaggcaaggtgggtgagcacataggaagacaa

SEQ ID NO: 888 - DNA, 71 bp, artificial sequence
  Synthesized
  misc_feature (36)..(36): n=C/T
gtggtcatgcctgtctgctttcaggacggcatgcgnaggctattgtcgcgatcttgggttcgatttggtgc

SEQ ID NO: 889 - DNA, 71 bp, artificial sequence
  Synthesized
  misc_feature (36)..(36): n=A/C
tctgcgctagaccgagtccgaaagctccctccgctncgcagctggtcggtctaaacttgccgtctccgttt

SEQ ID NO: 890 - DNA, 71 bp, artificial sequence
  Synthesized
  misc_feature (36)..(36): n=A/G
ctctactatgtaaacaatgtagtttatagtacaaangcagcaaaacaatactttacacaaacttctagaga

SEQ ID NO: 891 - DNA, 71 bp, artificial sequence
  Synthesized
  misc_feature (36)..(36): n=A/C
aaaccaccttatgtgaaaacattttacaccaaaaanaatactctacatcagattcttttaccaatgatata

SEQ ID NO: 892 - DNA, 71 bp, artificial sequence
  Synthesized
  misc_feature (36)..(36): n=A/G
cggctgcaatcaactcttcagcagcatcttttaccnctgcgccttcttctgtaccttcaggagctttggtt

SEQ ID NO: 893 - DNA, 71 bp, artificial sequence
  Synthesized
  misc_feature (36)..(36): n=C/T
acaggccactacgtcccccagttggcaaggaagatngtcgagtacaacgaggcctcgcctcaccccttcat

SEQ ID NO: 894 - DNA, 71 bp, artificial sequence
  Synthesized
  misc_feature (36)..(36): n=A/G
gctactgtgccatggtaaaaccgagtgttttacctncgttgtccgtatgcgtcttggtctcccaatcgtct

SEQ ID NO: 895 - DNA, 71 bp, artificial sequence
  Synthesized
  misc_feature (36)..(36): n=A/G
tagaaatcctcggcacacgctgggtcgaaccaacancggacataattggacttttttatactacaaactga

SEQ ID NO: 896 - DNA, 71 bp, artificial sequence
  Synthesized
  misc_feature (36)..(36): n=A/G
atgttgcttttgttgagtgacataacttggatctcncttttgttgagtggcataaaatccaaccagtgcta

SEQ ID NO: 897 - DNA, 71 bp, artificial sequence
  Synthesized
  misc_feature (36)..(36): n=C/T
acaacccatccatcgattcttcaaagctaccagagnaatgtataccccctccctcagaggaacaaaagtat

SEQ ID NO: 898 - DNA, 71 bp, artificial sequence
  Synthesized
  misc_feature (36)..(36): n=A/C
caatcaatttcaggctccactgttgcccaagatggncgctagaccttaagtgtcgcttaggtgctaggcag

SEQ ID NO: 899 - DNA, 71 bp, artificial sequence
  Synthesized
  misc_feature (36)..(36): n=A/G
atcacttctttgcttctgcaacaggtcttcttcggncgggatatcgtagtgaaggaagcccatgtagagcg

SEQ ID NO: 900 - DNA, 71 bp, artificial sequence
  Synthesized
  misc_feature (36)..(36): n=G/T
taggaaacagaaattagagggcactgagtaagatancaatatccaacaggcgtaagctgattacttcttgc

SEQ ID NO: 901 - DNA, 71 bp, artificial sequence
  Synthesized
  misc_feature (36)..(36): n=A/C
aatctctaaagaaggttagtgtctttctatctgacntttggtgtctttcgttcataatttcccccctattt

SEQ ID NO: 902 - DNA, 71 bp, artificial sequence
  Synthesized
  misc_feature (36)..(36): n=C/T
  misc_feature (36)..(36): n=C/T
acgcactatgcccggggttagagttataaataattnggagtgcggaagatagttctccttgctaggagttg

SEQ ID NO: 903 - DNA, 71 bp, artificial sequence
  Synthesized
  misc_feature (36)..(36): n=C/T
cctgcaggctctagggccataggaaaggaaatgccncgagcccctgccagactccgataaaccatctcctc

SEQ ID NO: 904 - DNA, 71 bp, artificial sequence
  Synthesized
  misc_feature (36)..(36): n=C/T
tatggtaccaatccttcgctttttctgcccatccangttttttgcagccgaaggctcctctttcttctgta

SEQ ID NO: 905 - DNA, 71 bp, artificial sequence
  Synthesized
  misc_feature (36)..(36): n=C/T
aatagacagtatttcctataaggaaaatagtgaganagagagtgtgtgaaatctgccaggttgggcagggc

SEQ ID NO: 906 - DNA, 71 bp, artificial sequence
  Synthesized
  misc_feature (36)..(36): n=C/T
ggctctcaggcaagaggtttatctatacctttatgnagcgatggatccagcctctcaaggcctgccggaac

SEQ ID NO: 907 - DNA, 71 bp, artificial sequence
  Synthesized
  misc_feature (36)..(36): n=A/G
cttatagactacatgtactttcataccataaacacnataaaaaactaaaacataactattgtacatggttt

SEQ ID NO: 908 - DNA, 71 bp, artificial sequence
  Synthesized
  misc_feature (36)..(36): n=A/G
agttaggcagcaagcgaccttcagctttacaaattngtacacatgtccttcagcttgcattcagtgtgcat

SEQ ID NO: 909 - DNA, 71 bp, artificial sequence
  Synthesized
  misc_feature (36)..(36): n=A/G
tcagattactcactttaaatatgatgagaaaaaatngatatgagaaccatgagtatatgaaggatcgaata

SEQ ID NO: 910 - DNA, 71 bp, artificial sequence
  Synthesized
  misc_feature (36)..(36): n=C/G
gtggggagatggctacattaattactgtatagtagnagctattcaagggacacgaaaggaggggggaaata

SEQ ID NO: 911 - DNA, 71 bp, artificial sequence
  Synthesized
  misc_feature (36)..(36): n=A/T
tcagtaaacatttggtttgcatatgactatgagagnttggtactgtattatctctgacaaaagaatggtaa

SEQ ID NO: 912 - DNA, 71 bp, artificial sequence
  Synthesized
  misc_feature (36)..(36): n=A/G
attggagaaattatattagggtaggatacaacacgngatgacctagttaggaatagcctaaccatagttaa

SEQ ID NO: 913 - DNA, 71 bp, artificial sequence
  Synthesized
  misc_feature (36)..(36): n=A/G
ggggccctcgcgtaacaccacgccgcacttcgtctntatcacttacgtgtgggacccacccgtcagggttt

SEQ ID NO: 914 - DNA, 71 bp, artificial sequence
  Synthesized
  misc_feature (36)..(36): n=A/T
cccttccttctttcccgttcccgggctaaaaaatanttgctaatcacagcagggactgagggacaagctcg

SEQ ID NO: 915 - DNA, 71 bp, artificial sequence
  Synthesized
  misc_feature (36)..(36): n=C/T
cctccgcccccttctctgtttcgtaaccggtgttgngatgccctctgctcagtgacaaactccccgcccgt

SEQ ID NO: 916 - DNA, 71 bp, artificial sequence
  Synthesized
  misc_feature (36)..(36): n=A/G
ccatcctcacggcggcgcggaccacgccggtggccnactcatggtgagcgtgataccttcacttcactttc

SEQ ID NO: 917 - DNA, 71 bp, artificial sequence
  Synthesized
  misc_feature (36)..(36): n=G/T
ttaaaatgcaggtacgtgaaaagcatcaaggtaaanatcgaggggtgacaagggttaaggtgataacagac

SEQ ID NO: 918 - DNA, 71 bp, artificial sequence
  Synthesized
  misc_feature (36)..(36): n=A/G
tagaaacatcataaatggaaccaacatcatcatctntaaccaaatccataaatagaaccataacatctcga

SEQ ID NO: 919 - DNA, 71 bp, artificial sequence
  Synthesized
  misc_feature (36)..(36): n=G/T
  misc_feature (36)..(36): n=G/T
agaaatttatttacatgaagataggtaacgtgaagnaacggaaaagaccccgccttctttccctatttgac

SEQ ID NO: 920 - DNA, 71 bp, artificial sequence
  Synthesized
  misc_feature (36)..(36): n=A/C
atacagagcaatcaattttagtttaatgaaagacanagctgcatctagaagaaaataatacagtgagtaaa

SEQ ID NO: 921 - DNA, 71 bp, artificial sequence
  Synthesized
  misc_feature (36)..(36): n=G/T
aggctgaccaatccagcagggggcacatatctacanccaccaagatgacgacaaaaggggacatcatcaaa

SEQ ID NO: 922 - DNA, 71 bp, artificial sequence
  Synthesized
  misc_feature (36)..(36): n=A/G
gttccaatcccaaaggactttgcagcttgaatggcngagaatcagtcattaccttcaaaatttcaaccact

SEQ ID NO: 923 - DNA, 71 bp, artificial sequence
  Synthesized
  misc_feature (36)..(36): n=A/G
aacttcattcgagagttttaagatgcatgattgcgncatcttttattcttgaatttcatctatatctatcc

SEQ ID NO: 924 - DNA, 71 bp, artificial sequence
  Synthesized
  misc_feature (36)..(36): n=C/T
atgccgatgaaccagataaggccacagaagatgganacgacccagaggccagtgagctggtcagtgcgccg

SEQ ID NO: 925 - DNA, 71 bp, artificial sequence
  Synthesized
  misc_feature (36)..(36): n=A/G
tctccgagagaaactgaagggaagccggaagaacancaatgctaatcttgtaggtcaggcatctcgcctcc

SEQ ID NO: 926 - DNA, 71 bp, artificial sequence
  Synthesized
  misc_feature (36)..(36): n=A/G
cctattatggggtatggctccgatccgatgcctcgngttcaaacctatccgtccggtgtcatcggtagata

SEQ ID NO: 927 - DNA, 71 bp, artificial sequence
  Synthesized
  misc_feature (36)..(36): n=A/G
cagcccccccctaaaagaatctcgtcccgagattcngagcgaaagatattcaagagtagagaagcatgtaa

SEQ ID NO: 928 - DNA, 71 bp, artificial sequence
  Synthesized
  misc_feature (36)..(36): n=A/G
catcatccttcggttctggaattatctcttcacccntgaaccttatcaagttgtcatcattctttccaaaa

SEQ ID NO: 929 - DNA, 71 bp, artificial sequence
  Synthesized
  misc_feature (36)..(36): n=C/T
aaccataatggatcctaagcaacatgagcttgcaancacccgatcaatgatctacggtcaacgtagatccc

SEQ ID NO: 930 - DNA, 71 bp, artificial sequence
  Synthesized
  misc_feature (36)..(36): n=G/T
cccttcaccgcgccgttatggtcacgggtattactnttgatatgctgtccctgctccccagcagcagcaac

SEQ ID NO: 931 - DNA, 71 bp, artificial sequence
  Synthesized
  misc_feature (36)..(36): n=C/T
taggttcgtccattagcttcaccaggcagagtagtncacccgttacgtcatcttggggtcgacttggctcg

SEQ ID NO: 932 - DNA, 71 bp, artificial sequence
  Synthesized
  misc_feature (36)..(36): n=A/G
gcacacgaaatttctcgttggagacaaactccgtcntggacctactccgcaccgcgggccgacctcaccat

SEQ ID NO: 933 - DNA, 71 bp, artificial sequence
  Synthesized
  misc_feature (36)..(36): n=C/T
ccctcctgcttgttgctcagcagttgctgtctagcntgcagtatgcatgtactgtttcacatgcatactac

SEQ ID NO: 934 - DNA, 71 bp, artificial sequence
  Synthesized
  misc_feature (36)..(36): n=A/G
aggaaatttttatggctttgatctcgatggcacttnggcaggagcttatgggatgcaactgaccaggcata

SEQ ID NO: 935 - DNA, 71 bp, artificial sequence
  Synthesized
  misc_feature (36)..(36): n=A/G
gtagtttgtaggtgtgcaatacaatgacggtggtcnacggtgaaggtgaagatcatgcgagcttgtgcaga

SEQ ID NO: 936 - DNA, 71 bp, artificial sequence
  Synthesized
  misc_feature (36)..(36): n=C/T
tgctgtaaaaatatcaaggccaaaaggagtgctttngcagtttgaagcataactgtattccctgatcccta

SEQ ID NO: 937 - DNA, 71 bp, artificial sequence
  Synthesized
  misc_feature (36)..(36): n=C/T
ccattgaaaaaccatttcttcaatgtggtgatcctngcttgagtgtcatctagataagaatgttaagatca

SEQ ID NO: 938 - DNA, 71 bp, artificial sequence
  Synthesized
  misc_feature (36)..(36): n=A/G
ccggtattcgccacgacccagggcagtacctcgacnaagaaccgtgcaccatcgtcgtccggtgtccgccg

SEQ ID NO: 939 - DNA, 71 bp, artificial sequence
  Synthesized
  misc_feature (36)..(36): n=A/T
gtggaggcctgtgaaggtatttccaatatgaatgcngttgtttaagggttatagaatgtagatataactta

SEQ ID NO: 940 - DNA, 71 bp, artificial sequence
  Synthesized
  misc_feature (36)..(36): n=A/C
cggctaggatcacaaatgttttacgtgacagaatancagtatctagccattttagcctcatgtcgtggtct

SEQ ID NO: 941 - DNA, 71 bp, artificial sequence
  Synthesized
  misc_feature (36)..(36): n=C/T
cccaaacagaacatctatctttgagctatgttttcnagttcgaaccatcttccaccactgtacaacgaagt

SEQ ID NO: 942 - DNA, 71 bp, artificial sequence
  Synthesized
  misc_feature (36)..(36): n=C/T
tgggaaacgacgacgcctcaaggcctaggatgcaanagaggagcaagcttcccacaccaccatagcgcact

SEQ ID NO: 943 - DNA, 71 bp, artificial sequence
  Synthesized
  misc_feature (36)..(36): n=C/T
cgagaaaacatcgtgtcaatggtctctctagtcaantagacaacgttctcgtactctcgcaggtacatctc

SEQ ID NO: 944 - DNA, 71 bp, artificial sequence
  Synthesized
  misc_feature (36)..(36): n=C/T
gcaacagcgtcttcttcatcggtccgccgcaaatcnagccgaattcgatctttcccaatggtgaatcataa

SEQ ID NO: 945 - DNA, 71 bp, artificial sequence
  Synthesized
  misc_feature (36)..(36): n=A/C
gactatgaatgttaacgaagacaaaggtgtgccagntatagcttcggctccacatatctcgattaaagagt

SEQ ID NO: 946 - DNA, 71 bp, artificial sequence
  Synthesized
  misc_feature (36)..(36): n=A/G
aatgaacagtcaaacatggaagttgtggatgaccgncaaacaaggggatgcgagtgcatattgaataaaaa

SEQ ID NO: 947 - DNA, 71 bp, artificial sequence
  Synthesized
  misc_feature (36)..(36): n=A/C
caggatgttttttgaggaggcagagagaggggtaantgagctctcacaggctagcagatggccagtaagtc

SEQ ID NO: 948 - DNA, 71 bp, artificial sequence
  Synthesized
  misc_feature (36)..(36): n=A/G
ctcctgatcgagaaggagaccgtggacggggagganttcatgagcttgttcattgacggccaggccgagct

SEQ ID NO: 949 - DNA, 71 bp, artificial sequence
  Synthesized
  misc_feature (36)..(36): n=A/C
ctccttcgaaaagaaatgaaatgatgcctcccagcngaagaagaaaaacatctcacgccacgcctgctcca

SEQ ID NO: 950 - DNA, 71 bp, artificial sequence
  Synthesized
  misc_feature (36)..(36): n=A/G
actttctggctgtgcatttccaagggctggttgatntgtgatcttgtagtctctgtgttgtcgtgcgcttg

SEQ ID NO: 951 - DNA, 71 bp, artificial sequence
  Synthesized
  misc_feature (36)..(36): n=C/T
aaggaaatatttcagtggcttgcaattgcaatgaantttgttgataaaatgttgctttaatattatatttg

SEQ ID NO: 952 - DNA, 71 bp, artificial sequence
  Synthesized
  misc_feature (36)..(36): n=C/T
cttggacaatcatgataaagcgaaagggatcaatancagatgtgcaacaggtgttttctaagtctgagcat

SEQ ID NO: 953 - DNA, 71 bp, artificial sequence
  Synthesized
  misc_feature (36)..(36): n=A/G
gtatgctgcacgagcacgagtaaatactacaggcancaagcaactagacagacttaatcgcatctcagcca

SEQ ID NO: 954 - DNA, 71 bp, artificial sequence
  Synthesized
  misc_feature (36)..(36): n=A/G
gattgtcagacatgcagatcggttagaaacttagantgtcaaaccattggcatgctgcagttgctggatgg

SEQ ID NO: 955 - DNA, 71 bp, artificial sequence
  Synthesized
  misc_feature (36)..(36): n=A/C
ccattgtcccaagtcttccatctggctccaattagncagcgccaaagctggtgcctcaatccatgaagcca

SEQ ID NO: 956 - DNA, 71 bp, artificial sequence
  Synthesized
  misc_feature (36)..(36): n=G/T
aaaaggataacaaaatattgtatagtgcaaattgtnttaagcgcacactgggaagccactgaaataataaa

SEQ ID NO: 957 - DNA, 71 bp, artificial sequence
  Synthesized
  misc_feature (36)..(36): n=C/T
ggtaggtatggagcacatacgtatatacacgcccanggtccgacggtttctagcagaaaaaccttagaatt

SEQ ID NO: 958 - DNA, 71 bp, artificial sequence
  Synthesized
  misc_feature (36)..(36): n=A/C
atggaaattgccctgtctcggtgactcaaaatccgntttagtcgtcaccgatatatactaatttgagggtg

SEQ ID NO: 959 - DNA, 71 bp, artificial sequence
  Synthesized
  misc_feature (36)..(36): n=A/C
tggaattttgggcaacggtttcgtttttatcaatanacattgatttaaccgcggtccatttctggcccatc

SEQ ID NO: 960 - DNA, 71 bp, artificial sequence
  Synthesized
  misc_feature (36)..(36): n=C/T
ccaagctagtgagcaactatacccgaccatgacatnggaggctaggctagcaagcccatccatgttggtca

SEQ ID NO: 961 - DNA, 71 bp, artificial sequence
  Synthesized
  misc_feature (36)..(36): n=A/G
tcacgttttgtttccgtccgtcacctgtaaatgacntttgacatgtactatagggttcggagtgtacctgg

SEQ ID NO: 962 - DNA, 71 bp, artificial sequence
  Synthesized
  misc_feature (36)..(36): n=C/T
atgaatctgctatctaaaagatgatgttctagatcntggatttcacattttgactgttaatgaaggctcaa

SEQ ID NO: 963 - DNA, 71 bp, artificial sequence
  Synthesized
  misc_feature (36)..(36): n=C/T
caggtgtacaagccacaaccacaagtcgtcgtcgtncaggctcgactcgaggtcgagggagaagcaactcc

SEQ ID NO: 964 - DNA, 71 bp, artificial sequence
  Synthesized
  misc_feature (36)..(36): n=A/C
ttattatgatatttataatactggacctaaacaaanctcaggaagtactaaatcaagtcaaaactctctaa

SEQ ID NO: 965 - DNA, 71 bp, artificial sequence
  Synthesized
  misc_feature (36)..(36): n=C/T
aatcttgtgttgtcaatccatataaaatttgaaaantggtggcccaaaattgaaaaaaaagattgacttag

SEQ ID NO: 966 - DNA, 71 bp, artificial sequence
  Synthesized
  misc_feature (36)..(36): n=A/G
tatctgttgggtggataagatcaggaacgagctagntgtaatcctgcggttagaatcattgtctcctatct

SEQ ID NO: 967 - DNA, 71 bp, artificial sequence
  Synthesized
  misc_feature (36)..(36): n=A/G
ggccaagttggaatcttttttgctgccgtatagaancgggagagcgacgcggatggttgtgggaatgtggg

SEQ ID NO: 968 - DNA, 71 bp, artificial sequence
  Synthesized
  misc_feature (36)..(36): n=A/G
acgtacggcacaagattattagctcaccagcagcangctgagcacggcaaaggattaggtcaaaggaaaag

SEQ ID NO: 969 - DNA, 71 bp, artificial sequence
  Synthesized
  misc_feature (36)..(36): n=G/T
gaaggcaatctctttcgctcgctttgcgatggtganggcgctctcctagaggaaattaacaaaactgtatc

SEQ ID NO: 970 - DNA, 71 bp, artificial sequence
  Synthesized
  misc_feature (36)..(36): n=A/G
tgcaagctggctactaatactctacacaaatgtacntaactatctatctgtttttactctcacctaaacca

SEQ ID NO: 971 - DNA, 71 bp, artificial sequence
  Synthesized
  misc_feature (36)..(36): n=A/C
gaaagtgggctggtctaggcagcactgtacagtctngtgccacccaccggacagtcccggtgtgcaccgaa

SEQ ID NO: 972 - DNA, 71 bp, artificial sequence
  Synthesized
  misc_feature (36)..(36): n=G/T
tgtgcaaggtaatccaagagagaccatacatagttnggaggaaaaaaaacaaataaaaagcacacgaaaat

SEQ ID NO: 973 - DNA, 71 bp, artificial sequence
  Synthesized
  misc_feature (36)..(36): n=A/C
ggagcccgtgacctcgacctcgaccttgatgtacgncgcagtttcttgttggattgctggccatctatctc

SEQ ID NO: 974 - DNA, 71 bp, artificial sequence
  Synthesized
  misc_feature (36)..(36): n=C/T
ttccttgattattacacaaacattagtagtatgtgncacttcttcgagagttatgttaagtgaagttcggt

SEQ ID NO: 975 - DNA, 71 bp, artificial sequence
  Synthesized
  misc_feature (36)..(36): n=G/T
cgagttcatgcgcctgaacgttgttgatctcgaacnacccttcgtcttgtatgaactccatcacctccctg

SEQ ID NO: 976 - DNA, 71 bp, artificial sequence
  Synthesized
  misc_feature (36)..(36): n=A/G
attctgcaatttttctgtacatgccattttgatcancttggctaacgtctgaaacaaaaactcaccaaagc

SEQ ID NO: 977 - DNA, 71 bp, artificial sequence
  Synthesized
  misc_feature (36)..(36): n=C/T
tcatggtctcagtcggcgctatgatcacctgaaggncctcaagtgcttcatgcccttcctgtccttccaca

SEQ ID NO: 978 - DNA, 71 bp, artificial sequence
  Synthesized
  misc_feature (36)..(36): n=A/G
atttggttggggcttatcgacgtgtatcaattcacngcgcaaactgatcacgtcccttccggtttggttgc

SEQ ID NO: 979 - DNA, 71 bp, artificial sequence
  Synthesized
  misc_feature (36)..(36): n=C/T
gctaagcatcattccttaagcatacttaggaacgantctttggtctaaaggtagcccagacatctgggact

SEQ ID NO: 980 - DNA, 71 bp, artificial sequence
  Synthesized
  misc_feature (36)..(36): n=G/T
ccgttagcgaacttggttgctatgctgaggagatcngcggtggtcttcgttcgccctcgccaaagctcatg

SEQ ID NO: 981 - DNA, 71 bp, artificial sequence
  Synthesized
  misc_feature (36)..(36): n=A/C
atgacttttggctggcaggagtcagcaactgaaacnaaaaaagttctcaaattgacgaaattggattttct

SEQ ID NO: 982 - DNA, 71 bp, artificial sequence
  Synthesized
  misc_feature (36)..(36): n=A/G
aaaaaaatcaatggtggtttacgttttttaagaagnaaaagcggaaacttccacgaccacccgcgctctct

SEQ ID NO: 983 - DNA, 71 bp, artificial sequence
  Synthesized
  misc_feature (36)..(36): n=A/G
gacaatgactcgacacagtggattcaaatccgatcngcgattctgttaccctagccccagtcccgtcgtcg

SEQ ID NO: 984 - DNA, 71 bp, artificial sequence
  Synthesized
  misc_feature (36)..(36): n=A/G
ttttgttcgcaaagacgaagaacgacgaattcaacncatgcgactatgcgagtgtcgccaaccgtgagaat

SEQ ID NO: 985 - DNA, 71 bp, artificial sequence
  Synthesized
  misc_feature (36)..(36): n=A/C
tagaataggttaggttaaatctagttgataaataancttagagggaaataaccactccatcgcatttgtag

SEQ ID NO: 986 - DNA, 71 bp, artificial sequence
  Synthesized
  misc_feature (36)..(36): n=A/G
tggccgtgggtgagccattttcccacaacaaagacnaaataatatttgtgaggatttctttaaaaataaac

SEQ ID NO: 987 - DNA, 71 bp, artificial sequence
  Synthesized
  misc_feature (36)..(36): n=A/G
ttctcatagtcccttacagggtcagcatggaagcanctagagaatcagtttcacacccaatatcattctaa

SEQ ID NO: 988 - DNA, 71 bp, artificial sequence
  Synthesized
  misc_feature (36)..(36): n=C/T
aacgtaagtgtcttaaacattatttcatcaaaccanagcggatctcatgggtaatctcccacaggaagatg

SEQ ID NO: 989 - DNA, 71 bp, artificial sequence
  Synthesized
  misc_feature (36)..(36): n=A/G
agcgtcttcatcatcggcttctttctctgcaactancataagcatctccagtcgcttgtcgaacagagctg

SEQ ID NO: 990 - DNA, 71 bp, artificial sequence
  Synthesized
  misc_feature (36)..(36): n=A/T
cattcattgcacttgcatcgttgtgttgccaaaaanttttactgcagttgaaggtgtttgcatccttctca

SEQ ID NO: 991 - DNA, 71 bp, artificial sequence
  Synthesized
  misc_feature (36)..(36): n=C/T
ctagttttctttaaaaaaatatcaggaacacgatgnagccgatcgagcttgcacgcgcgcgtacgcccatg

SEQ ID NO: 992 - DNA, 71 bp, artificial sequence
  Synthesized
  misc_feature (36)..(36): n=C/T
gagtggctcatggcatactctgcattggtgtctccnaggggcaggttgaatgccctcacgcacgaaggctg

SEQ ID NO: 993 - DNA, 71 bp, artificial sequence
  Synthesized
  misc_feature (36)..(36): n=C/T
aatattacattccacgattcctgctccaggttgacnccttgtcccatcttttcattctcctctctttcttt

SEQ ID NO: 994 - DNA, 71 bp, artificial sequence
  Synthesized
  misc_feature (36)..(36): n=C/T
tcctattttcattttttaaaataattgtcactaaangcatgagtgtgtcaagccgtcaagcgacaaaaaca

SEQ ID NO: 995 - DNA, 71 bp, artificial sequence
  Synthesized
  misc_feature (36)..(36): n=C/T
acacgcatactacagaaaactagagtccaaatgcanggcgcaaaagtacacacgatgaatacgtcatttcc

SEQ ID NO: 996 - DNA, 71 bp, artificial sequence
  Synthesized
  misc_feature (36)..(36): n=C/T
acagtaaaacctcaaatttagattatagagtagtcnactagggtatagttatttgagacacttgagagagg

SEQ ID NO: 997 - DNA, 71 bp, artificial sequence
  Synthesized
  misc_feature (36)..(36): n=A/G
aagcacggcccttggcacatgcttgccgttgacccnctgttgctgttgctgctgccgccgccgccactgcc

SEQ ID NO: 998 - DNA, 71 bp, artificial sequence
  Synthesized
  misc_feature (36)..(36): n=A/G
ccagcccttgggtatgatcctcaaccaccttcgtcncgtttgtaggagtgtgtagcacctgtccgttgacc

SEQ ID NO: 999 - DNA, 71 bp, artificial sequence
  Synthesized
  misc_feature (36)..(36): n=G/T
gctgcacctcatcgctaacaatcagccgcaacgcangcaccaaccacggattctgctcaagattcgtcctc

SEQ ID NO: 1000 - DNA, 71 bp, artificial sequence
  Synthesized
  misc_feature (36)..(36): n=C/T
caatgagtagttggttcaatatacaagtggcatganacaaatacagagagataagattaagggaaaatata

SEQ ID NO: 1001 - DNA, 71 bp, artificial sequence
  Synthesized
  misc_feature (36)..(36): n=A/G
accaatgattcagctggtgatgggactacaactgcntccgtccttgctcgtgaaatcatcaagctaggcct

SEQ ID NO: 1002 - DNA, 71 bp, artificial sequence
  Synthesized
  misc_feature (36)..(36): n=G/T
ctataacgggtgaaatgtaatggaacgactaaaacngtagtcgaatgtctgaaactataacagaatggcta

SEQ ID NO: 1003 - DNA, 71 bp, artificial sequence
  Synthesized
  misc_feature (36)..(36): n=A/G
taaggtttaggtgacgagcctaattaaagcatactnagaggctacttctactacgtacctgccgcgccggc

SEQ ID NO: 1004 - DNA, 71 bp, artificial sequence
  Synthesized
  misc_feature (36)..(36): n=A/C
gtgttgcataaccagattcctcaatgcccacagttntttggtcctctctctccactcggtgctgatctgat

SEQ ID NO: 1005 - DNA, 71 bp, artificial sequence
  Synthesized
  misc_feature (36)..(36): n=A/C
acttatgcacgagaatgactactaactattatgtcnttgattcttgattttatttgtattatatttctagt

SEQ ID NO: 1006 - DNA, 71 bp, artificial sequence
  Synthesized
  misc_feature (36)..(36): n=G/T
cctttttatttttgtacacacctggatggattcggngtcagagtaccattaatccatttatggcaataaaa

SEQ ID NO: 1007 - DNA, 71 bp, artificial sequence
  Synthesized
  misc_feature (36)..(36): n=G/T
agatcaatttatgggtgttgtcgaggctaaatttanggcatatgactatgagcatgcattgaatgaattgt

SEQ ID NO: 1008 - DNA, 71 bp, artificial sequence
  Synthesized
  misc_feature (36)..(36): n=C/T
cgcttgtctatataaagctggaagctctgctcctcncgccatcccacatccatctccacctccctcataca

SEQ ID NO: 1009 - DNA, 71 bp, artificial sequence
  Synthesized
  misc_feature (36)..(36): n=A/G
caaaaccaatgctcaaactccaccacacatactctnaagggcctagaatcataaccacaaaattttggact

SEQ ID NO: 1010 - DNA, 71 bp, artificial sequence
  Synthesized
  misc_feature (36)..(36): n=A/G
acacgacgacacgagcgacgtgggcgtatttataangtgcggtgagacgagaaggatcaaggtcagcgcgg

SEQ ID NO: 1011 - DNA, 71 bp, artificial sequence
  Synthesized
  misc_feature (36)..(36): n=C/T
tagacgtcgttatagccgtcaccgggtttaaatatngacggccccaataggttgtttggcggtgaccgttg

SEQ ID NO: 1012 - DNA, 71 bp, artificial sequence
  Synthesized
  misc_feature (36)..(36): n=C/T
ggacacatagataaatcattcaatcattacatacanatgtgtacaatatgtattaagccaaaagtagtttg

SEQ ID NO: 1013 - DNA, 71 bp, artificial sequence
  Synthesized
  misc_feature (36)..(36): n=A/G
ccacagtatttgctatacgtgcttgttcccagcatnccagtatgtctgatattcaggccctctcctttcta

SEQ ID NO: 1014 - DNA, 71 bp, artificial sequence
  Synthesized
  misc_feature (36)..(36): n=A/G
ctttggctaacattctgcagcaacctgggggcccgncaaaacgcttccgtccacgcgaaactgatcgaaat

SEQ ID NO: 1015 - DNA, 71 bp, artificial sequence
  Synthesized
  misc_feature (36)..(36): n=A/T
accaaaagataacgagatcacccatatataatactntctgtctcaatttataattcgtttgacttttgtat

SEQ ID NO: 1016 - DNA, 71 bp, artificial sequence
  Synthesized
  misc_feature (36)..(36): n=G/T
atgttgtctaattcaactttgaataggcgtttttanactgaagttgcttttattgcttgttgttttattaa

SEQ ID NO: 1017 - DNA, 71 bp, artificial sequence
  Synthesized
  misc_feature (36)..(36): n=C/T
ctagtcgacctaaataaatttagcccaaaagactgngcgattcattgttgaaacggagcttcgccttgcat

SEQ ID NO: 1018 - DNA, 71 bp, artificial sequence
  Synthesized
  misc_feature (36)..(36): n=C/T
gcatgcaaacaagaacatagatttacagtggcttgnatcatcaattgagctatgttttttcgataaccagt

SEQ ID NO: 1019 - DNA, 71 bp, artificial sequence
  Synthesized
  misc_feature (36)..(36): n=A/G
cttggcctgcctctttttttagtaaactaccacacnatcatgttattttgtacaatttcatagctaattga

SEQ ID NO: 1020 - DNA, 71 bp, artificial sequence
  Synthesized
  misc_feature (36)..(36): n=A/C
tggatggatggatacctctgcaatagaagagatttngcacaaattacgaaacaaatatgagacggagcaaa

SEQ ID NO: 1021 - DNA, 71 bp, artificial sequence
  Synthesized
  misc_feature (36)..(36): n=C/T
tttgcgtgtggcacactggcacaccgtaatccacancgatcatcgtggaccgtggtgaaagcgcgcgtagc

SEQ ID NO: 1022 - DNA, 71 bp, artificial sequence
  Synthesized
  misc_feature (36)..(36): n=A/G
caaatacttaattttggggattgatggaggggattnagggaaaattaactagcccttaacagaaaattgat

SEQ ID NO: 1023 - DNA, 71 bp, artificial sequence
  Synthesized
  misc_feature (36)..(36): n=A/C
ggcgtcgtggcctcccagaaagaaaacgcgtttgcnggatcggatcttggccggacgcggccgcggcggcc

SEQ ID NO: 1024 - DNA, 71 bp, artificial sequence
  Synthesized
  misc_feature (36)..(36): n=A/G
ctccaaaggaagagtttcacgctccagctttcgcangaaagccctcagagaaccgccggacagaaactcgg

SEQ ID NO: 1025 - DNA, 71 bp, artificial sequence
  Synthesized
  misc_feature (36)..(36): n=G/T
tattatatgttctgtgtaatactcattactactatnttttggttggatgatcatctactgtttctcagact

SEQ ID NO: 1026 - DNA, 71 bp, artificial sequence
  Synthesized
  misc_feature (36)..(36): n=C/T
atgggtttttagtgttagtagatctttcgtgtttangctctttagttaaaatcttggaattttatcatatt

SEQ ID NO: 1027 - DNA, 71 bp, artificial sequence
  Synthesized
  misc_feature (36)..(36): n=C/T
ctctcccttggttatttggaggaggacgaaccttgncccgtccctgcaagcccatatgcttcggtggtcct

SEQ ID NO: 1028 - DNA, 71 bp, artificial sequence
  Synthesized
  misc_feature (36)..(36): n=C/T
tgctcgtgaagggttatccttctagttcttaccacnggcgtaaggctgtgtttgttacgcaaagcaaaagc

SEQ ID NO: 1029 - DNA, 71 bp, artificial sequence
  Synthesized
  misc_feature (36)..(36): n=C/T
aaccgtctatctacaacctaggtcgggacacatganggaaatggtgatggcgacgacgacgacggcgatct

SEQ ID NO: 1030 - DNA, 71 bp, artificial sequence
  Synthesized
  misc_feature (36)..(36): n=C/T
atcccatcccaggagaagaggcatattctccggcgnagggagggagcaagcaactcagggtcaaaaaaaat

SEQ ID NO: 1031 - DNA, 71 bp, artificial sequence
  Synthesized
  misc_feature (36)..(36): n=A/G
atcttaattatttcaaacatggaactaaaattactnacggttaatttggttcggttattcagctttggttt

SEQ ID NO: 1032 - DNA, 71 bp, artificial sequence
  Synthesized
  misc_feature (36)..(36): n=A/G
gaaggatacaacactagtgaggaagcatacaacccnatccgagaatgcctccacgtcgactcagagatcca

SEQ ID NO: 1033 - DNA, 71 bp, artificial sequence
  Synthesized
  misc_feature (36)..(36): n=A/G
ggcatgaggaaagctgcgtccaggcaccacaacctncacctccacccgcaggcaaaactagctacaacaac

SEQ ID NO: 1034 - DNA, 71 bp, artificial sequence
  Synthesized
  misc_feature (36)..(36): n=A/C
aaaagtcaatcagaataattatgtgaaggcaaaagnagtcccaaaggtcatacacatgtacagggactatt

SEQ ID NO: 1035 - DNA, 71 bp, artificial sequence
  Synthesized
  misc_feature (36)..(36): n=A/G
ggcgtgcagctctaaagacaacaaagtcagtcagcntgcaggggacacccactgctgaaaactcattgaca

SEQ ID NO: 1036 - DNA, 71 bp, artificial sequence
  Synthesized
  misc_feature (36)..(36): n=C/G
aattgagcacgcttctatcaccgctccacgtatacnattcgctccaatcaaatcacgttagatttatatta

SEQ ID NO: 1037 - DNA, 71 bp, artificial sequence
  Synthesized
  misc_feature (36)..(36): n=A/G
gagattcgtctcgttgttcgagcagaagccgagcancctcacgatgtagcggtgtcggatcctcccgaggg

SEQ ID NO: 1038 - DNA, 71 bp, artificial sequence
  Synthesized
  misc_feature (36)..(36): n=C/T
gcggccatggccaggtctgatgatcagtgcgaccgncttgtgtgggcattgcccatggagcgtccgctcag

SEQ ID NO: 1039 - DNA, 71 bp, artificial sequence
  Synthesized
  misc_feature (36)..(36): n=A/C
ccgtcgctgccctaccttctcaggccaccatcgcancctcactcgccaccgtcgcggcatctaatccctga

SEQ ID NO: 1040 - DNA, 71 bp, artificial sequence
  Synthesized
  misc_feature (36)..(36): n=A/G
atcgtcggcgacacgctaggtgcgtgcgtacgtgcncaattgcatatgcatgcgtagtatatatatagccc

SEQ ID NO: 1041 - DNA, 71 bp, artificial sequence
  Synthesized
  misc_feature (36)..(36): n=A/G
gtaatagtgctccgcagaacgctgcagcactaaacngttaccaaaatttaccgagaagctccagcgcaaat

SEQ ID NO: 1042 - DNA, 71 bp, artificial sequence
  Synthesized
  misc_feature (36)..(36): n=C/G
catcatctgagtgcctgccaacagcagggagatacncttggctccaaccgccacccataaatcacactcct

SEQ ID NO: 1043 - DNA, 71 bp, artificial sequence
  Synthesized
  misc_feature (36)..(36): n=A/G
tttcatgtagcataaccttgctaacttcttgtgacnggaggggttgtgtgcggttcgtgggggcacaggga

SEQ ID NO: 1044 - DNA, 71 bp, artificial sequence
  Synthesized
  misc_feature (36)..(36): n=C/T
tatgccagatactgaagtcaagcaaatgctcatggngagaggtacccctgattcaccatcactcacttatt

SEQ ID NO: 1045 - DNA, 71 bp, artificial sequence
  Synthesized
  misc_feature (36)..(36): n=C/T
gaatcaattatccacctcttcttcaaatgcaactangcgaagagatgttggcagacaataggaatcactcc

SEQ ID NO: 1046 - DNA, 71 bp, artificial sequence
  Synthesized
  misc_feature (36)..(36): n=G/T
attccggttgatttgcagcttattaattgtacggtntttttttactcctgggcttatcgatctgtcacttg

SEQ ID NO: 1047 - DNA, 71 bp, artificial sequence
  Synthesized
  misc_feature (36)..(36): n=A/G
ggctggtgtggtgtgtgtgtggaccaaatttattcntaagcataaaattcagttttccaaacaacattccc

SEQ ID NO: 1048 - DNA, 71 bp, artificial sequence
  Synthesized
  misc_feature (36)..(36): n=G/T
ggtggactatttttttgtctcatgttgctcagtcanctatggttgtggtcgctcctcagtaacattagcga

SEQ ID NO: 1049 - DNA, 71 bp, artificial sequence
  Synthesized
  misc_feature (36)..(36): n=C/T
acaacttcaaaaagtataccaaacggtggactcttncattggcttcttgtagcatccaaaatcctgatttt

SEQ ID NO: 1050 - DNA, 71 bp, artificial sequence
  Synthesized
  misc_feature (36)..(36): n=C/T
acaacgctatccaaaggatgcgaagatctgcatcantgtagtctttaaggctcgatatgccgacttcttta

SEQ ID NO: 1051 - DNA, 71 bp, artificial sequence
  Synthesized
  misc_feature (36)..(36): n=C/T
atgaaggaactctattactttcttagattctgacanttaaaatgaacatgtttatgataaccgtgaatcat

SEQ ID NO: 1052 - DNA, 71 bp, artificial sequence
  Synthesized
  misc_feature (36)..(36): n=C/T
tgtagcaaccaacctttgcaagaaaagtagcagttnaattttttccattacaagaggaaacaaagttgatg

SEQ ID NO: 1053 - DNA, 71 bp, artificial sequence
  Synthesized
  misc_feature (36)..(36): n=G/T
ctgagcaagtgtcgaggtgacaatcactcaacagcncgatctggacggccagaagctccggtcgctttcct

SEQ ID NO: 1054 - DNA, 71 bp, artificial sequence
  Synthesized
  misc_feature (36)..(36): n=A/C
tcggtacgtgttctgacgtgagcactaagccggganctcaccagcatgtatagtgagtacctgtgtagaaa

SEQ ID NO: 1055 - DNA, 71 bp, artificial sequence
  Synthesized
  misc_feature (36)..(36): n=A/G
atgttaaggccctcagattcttcaccgtagtcctgntaattgaaacgaaacagtggaatgtcatgtcacct

SEQ ID NO: 1056 - DNA, 71 bp, artificial sequence
  Synthesized
  misc_feature (36)..(36): n=A/C
cgaaacgaattacatttttcatttttcaggggaaangttggtctggtgtgcgctctgctggaagctgatct

SEQ ID NO: 1057 - DNA, 71 bp, artificial sequence
  Synthesized
  misc_feature (36)..(36): n=A/G
acatttccttccttcacttcagacatggtcagctcncagctacagctgcaccgttacgcaacgggtcgcga

SEQ ID NO: 1058 - DNA, 71 bp, artificial sequence
  Synthesized
  misc_feature (36)..(36): n=G/T
aatggaacctatcagcttcttgcatcgttcaatttnctatgatcaaagccaaagcttacgtagttacgttt

SEQ ID NO: 1059 - DNA, 71 bp, artificial sequence
  Synthesized
  misc_feature (36)..(36): n=C/T
agcacctcaagcagtatcagtagcatcagccacaanaataccaatatctgctatcttcaaatcaagtgcat

SEQ ID NO: 1060 - DNA, 71 bp, artificial sequence
  Synthesized
  misc_feature (36)..(36): n=G/T
  misc_feature (36)..(36): n=G/T
ttttgaatgcatagaggtgtttggtaacaaaatatnctctttattttacaccatgttccatttaaaatatt

SEQ ID NO: 1061 - DNA, 71 bp, artificial sequence
  Synthesized
  misc_feature (36)..(36): n=C/T
cttgatcgtgttccctacatcgttctcgccattttnccgaagggacctgctgcatgctcagttatgccata

SEQ ID NO: 1062 - DNA, 71 bp, artificial sequence
  Synthesized
  misc_feature (36)..(36): n=A/G
gttgacatcttcaggagtatagtgggatagctgcanaaacctgtctctatactcacttactgacatgggcc

SEQ ID NO: 1063 - DNA, 71 bp, artificial sequence
  Synthesized
  misc_feature (36)..(36): n=A/C
tgttcatcatgtccctctgcccaactaatctgcaangtggcatggtccccctccactcttggctgcggacc

SEQ ID NO: 1064 - DNA, 71 bp, artificial sequence
  Synthesized
  misc_feature (36)..(36): n=A/G
ttgaatgaatttagaaagagcactagatttacaacntcaaaatagtattactagacacataaaaaatattt

SEQ ID NO: 1065 - DNA, 71 bp, artificial sequence
  Synthesized
  misc_feature (36)..(36): n=A/G
actagtactactacaaggtaacccatggagaaagangagcagcaggccaatgattataccgacgaggacac

SEQ ID NO: 1066 - DNA, 71 bp, artificial sequence
  Synthesized
  misc_feature (36)..(36): n=C/T
ttgctgccttattgctaaggtgagaaaaatcattanaggtactgtgtccatgccgccaaagtggtcggttg

SEQ ID NO: 1067 - DNA, 71 bp, artificial sequence
  Synthesized
  misc_feature (36)..(36): n=C/T
ggtcgacatagccaacatgatggcactcaggcccangttgcccgcgccgtctgtaataaagaatatgggac

SEQ ID NO: 1068 - DNA, 71 bp, artificial sequence
  Synthesized
  misc_feature (36)..(36): n=C/G
cgatcaagaacaggcagggattagttgtagggttcnagttccagaagtagcgactttgttgtcttaagtat

SEQ ID NO: 1069 - DNA, 71 bp, artificial sequence
  Synthesized
  misc_feature (36)..(36): n=A/G
ttctgaaatctgcgatctgaagtcattgaccttcgncaccaagccatcgagaaagacaaaattcttctttc

SEQ ID NO: 1070 - DNA, 71 bp, artificial sequence
  Synthesized
  misc_feature (36)..(36): n=A/G
agattctcctagtgtgtagccccttgttaggtttcnccagtcatacaaacacagtactcctccctaaggtg

SEQ ID NO: 1071 - DNA, 71 bp, artificial sequence
  Synthesized
  misc_feature (36)..(36): n=C/T
gcgggacaagacaagctacgtacacggtacggcagngcactgcatgtggtgatgtggagccaggcatactg

SEQ ID NO: 1072 - DNA, 71 bp, artificial sequence
  Synthesized
  misc_feature (36)..(36): n=A/G
ggcactttattagattgtgcaatatacagtactagnaaaatggtctttatatattccttttttcagaatag

SEQ ID NO: 1073 - DNA, 71 bp, artificial sequence
  Synthesized
  misc_feature (36)..(36): n=A/G
gtatgatgtaaatgctagggccatagttgagtatcnacctaataggactcatctatgtggtgccatcaacg

SEQ ID NO: 1074 - DNA, 71 bp, artificial sequence
  Synthesized
  misc_feature (36)..(36): n=A/G
agcacctttagggatgaagtttagggccgtgactcnccggattgcttttcccggccatggcctccgtcgcg

SEQ ID NO: 1075 - DNA, 71 bp, artificial sequence
  Synthesized
  misc_feature (36)..(36): n=C/T
cgaaaaacgaagaaattgttacgaaggaaaaaactnatgctttgtatgcaccccaatacccattatcgaaa

SEQ ID NO: 1076 - DNA, 71 bp, artificial sequence
  Synthesized
  misc_feature (36)..(36): n=C/T
gggttaaaaccttcaaattgagtgaggacatttatncggataggcttacgcaccgcgttcgtatgttcatc

SEQ ID NO: 1077 - DNA, 71 bp, artificial sequence
  Synthesized
  misc_feature (36)..(36): n=A/G
gcacggcggtgggttcaccggagctcacgaaatccngttctcccgagcgccatatccaaattcgcacaacc

SEQ ID NO: 1078 - DNA, 71 bp, artificial sequence
  Synthesized
  misc_feature (36)..(36): n=A/G
tgacgaggtgggcccccctcctgttgctgacgcggntttggcaaacggactggcgttcgtctgttcatccg

SEQ ID NO: 1079 - DNA, 71 bp, artificial sequence
  Synthesized
  misc_feature (36)..(36): n=A/G
ataataaagtcctcacctttagggtcgaatccaacngttgctggcgcagcagtgtatctagccagctcgaa

SEQ ID NO: 1080 - DNA, 71 bp, artificial sequence
  Synthesized
  misc_feature (36)..(36): n=A/G
ttcgagttttgtaaatgtctgactcatgatttatcntagagagaggcagcgagccatgagacccggtcaaa

SEQ ID NO: 1081 - DNA, 71 bp, artificial sequence
  Synthesized
  misc_feature (36)..(36): n=C/T
tttctcggtacatttctaaagtgttaaaggtgcttnggcaaagaccaccttcggggtgaatcaggaaaaga

SEQ ID NO: 1082 - DNA, 71 bp, artificial sequence
  Synthesized
  misc_feature (36)..(36): n=C/T
gaggattgaacgcctctgaacgcagcacattgaggntgtgcgagacaaatcagccacggaaaacaagagcc

SEQ ID NO: 1083 - DNA, 71 bp, artificial sequence
  Synthesized
  misc_feature (36)..(36): n=G/T
aatatgagcaacgctacatggtgtttgaatactgcnaaatgcaagcggtgctggatatcaattaatctcca

SEQ ID NO: 1084 - DNA, 71 bp, artificial sequence
  Synthesized
  misc_feature (36)..(36): n=C/T
tttgtgcagcccatcagttgtcgcaaaaaaagttcnagcgccggctatgctgttggttccatgccaaaaaa

SEQ ID NO: 1085 - DNA, 71 bp, artificial sequence
  Synthesized
  misc_feature (36)..(36): n=C/T
tcagtttgttgatcttttctctcacatccaggatantgttcatgatccaatcacaagcagaatgaataaca

SEQ ID NO: 1086 - DNA, 71 bp, artificial sequence
  Synthesized
  misc_feature (36)..(36): n=G/T
tggctacgataatccatattttgaaagcgaactatnacataatcatttggaattgcattgagaagtccttg

SEQ ID NO: 1087 - DNA, 71 bp, artificial sequence
  Synthesized
  misc_feature (36)..(36): n=A/G
gcatatgcattccttgcaccaaccaatggagcctanaggaattgaaggcgactggagctatggcccttgaa

SEQ ID NO: 1088 - DNA, 71 bp, artificial sequence
  Synthesized
  misc_feature (36)..(36): n=A/G
cctggtaaccaaaatggccgacacccctattttttntcaacatgaccaaaatcaacacccaaccttctctc

SEQ ID NO: 1089 - DNA, 71 bp, artificial sequence
  Synthesized
  misc_feature (36)..(36): n=A/G
atgaaccaaacagcgtaaagggattggaccacgttnccaaaggcaacaaacaaaaataggtaaccattgca

SEQ ID NO: 1090 - DNA, 71 bp, artificial sequence
  Synthesized
  misc_feature (36)..(36): n=C/T
atttgatcagaccgacgaggctactatacaaattangtaatcagtaaaacaaaaatataaactgcccgtct

SEQ ID NO: 1091 - DNA, 71 bp, artificial sequence
  Synthesized
  misc_feature (36)..(36): n=C/T
ggctagattcgactcaaagaaaaaaatgaaacatgngatctaataatcaacaaagttactattagcccaac

SEQ ID NO: 1092 - DNA, 71 bp, artificial sequence
  Synthesized
  misc_feature (36)..(36): n=A/G
atcttacaagtatgggctaatgtggttagttgctgncttgctttaagattagtgggatgaacatgttgtca

SEQ ID NO: 1093 - DNA, 71 bp, artificial sequence
  Synthesized
  misc_feature (36)..(36): n=A/G
gtcaatgagcttaataatcctgctagaattcagaantatcctcctttagtctgtgggggtgttttctttca

SEQ ID NO: 1094 - DNA, 71 bp, artificial sequence
  Synthesized
  misc_feature (36)..(36): n=C/T
aactcgaaggacagatggcgttatatttggggctcngatatttgttcaacaaaaaagacttacagacacct

SEQ ID NO: 1095 - DNA, 71 bp, artificial sequence
  Synthesized
  misc_feature (36)..(36): n=G/T
tttgaatgcagcatagaattattgacaacacttatngcactcgtgacatcgcaagccagggcccatgatta

SEQ ID NO: 1096 - DNA, 71 bp, artificial sequence
  Synthesized
  misc_feature (36)..(36): n=A/G
attccccttgattgcatctatacgagggtggtttancctagccccaaactagatcgaggttcttccatctg

SEQ ID NO: 1097 - DNA, 71 bp, artificial sequence
  Synthesized
  misc_feature (36)..(36): n=G/T
tcacgagcattcctgctcggctgctcctccgtcatncgccgccttcgtcctcgccctcgctcctctatctt

SEQ ID NO: 1098 - DNA, 71 bp, artificial sequence
  Synthesized
  misc_feature (36)..(36): n=A/G
atcggccctttgatgtgtggtttgagtattatgctntctccccacccactggtttgggttttgtggggata

SEQ ID NO: 1099 - DNA, 71 bp, artificial sequence
  Synthesized
  misc_feature (36)..(36): n=A/T
  misc_feature (36)..(36): n=A/T
aaggtaatcgacacataccttgtccttttttgttgntccttaatccaactttatccaatgttgtaacctgc

SEQ ID NO: 1100 - DNA, 71 bp, artificial sequence
  Synthesized
  misc_feature (36)..(36): n=A/C
tatagaggatgtatatagaggaaatagatttaatgncttggtcgtttgttcccttcctaactcctccccat

SEQ ID NO: 1101 - DNA, 71 bp, artificial sequence
  Synthesized
  misc_feature (36)..(36): n=C/T
tcggatgattagtcacttgatgaagggaatggttcngataccaattgagagcacctagagggggtgaatag

SEQ ID NO: 1102 - DNA, 71 bp, artificial sequence
  Synthesized
  misc_feature (36)..(36): n=C/T
aatgtgataaagggtgaaccgttgatcacgaagggnccaaggctgacatgcatgtttgctgacggatgtca

SEQ ID NO: 1103 - DNA, 71 bp, artificial sequence
  Synthesized
  misc_feature (36)..(36): n=A/G
tctcgtccgcttgtaacccctactacgagcaatcancaacagggagtcggtagcacgagccactaaagact

SEQ ID NO: 1104 - DNA, 71 bp, artificial sequence
  Synthesized
  misc_feature (36)..(36): n=A/G
gttttggggaatgaaaatagtgaagacagtattgcnaaatcgaattggagatgaatttgtgaatgagtgta

SEQ ID NO: 1105 - DNA, 71 bp, artificial sequence
  Synthesized
  misc_feature (36)..(36): n=A/G
gttgaactctaacaccacgagcacgatcgacctcancaactgttttcaaggctcacccgagtcccgaggtg

SEQ ID NO: 1106 - DNA, 71 bp, artificial sequence
  Synthesized
  misc_feature (36)..(36): n=A/G
agcgtccatcttctccagcatacagttagttattanaccaacagcgcaatccagcttctttttttttagcc

SEQ ID NO: 1107 - DNA, 71 bp, artificial sequence
  Synthesized
  misc_feature (36)..(36): n=A/G
ggatgctgtggctccttaacctgcagcacagctttnccggacgcaagttcgagcatgcactgaagcatggt

SEQ ID NO: 1108 - DNA, 71 bp, artificial sequence
  Synthesized
  misc_feature (36)..(36): n=C/T
aacctattccgtttctcgctctgtatcgattctagnttctcctgtcggtgatggttcttatggctagcagg

SEQ ID NO: 1109 - DNA, 71 bp, artificial sequence
  Synthesized
  misc_feature (36)..(36): n=C/T
tagcttattctagcgcagtcaaagattcacactganttgggttcgttctcactgaaccttaatctattaat

SEQ ID NO: 1110 - DNA, 71 bp, artificial sequence
  Synthesized
  misc_feature (36)..(36): n=A/G
gttttagtcactgcagctgctggtggaacaggacantttgctgttcaggtgagctgatgacacttatgaac

SEQ ID NO: 1111 - DNA, 71 bp, artificial sequence
  Synthesized
  misc_feature (36)..(36): n=C/T
tggagagagagatgcagttggttccacttccacccngcttctgaaatagtctgatggagacgttatagtaa

SEQ ID NO: 1112 - DNA, 71 bp, artificial sequence
  Synthesized
  misc_feature (36)..(36): n=A/G
atgcgatgcaggggggttttatataggagtgctgtntgtgtgctggttgtggaggttcaaagccggttagg

SEQ ID NO: 1113 - DNA, 71 bp, artificial sequence
  Synthesized
  misc_feature (36)..(36): n=A/G
tgtagaatattataaaatggagaattgtgggacccncgagtggtggatctagaaattggtcaagacctggg

SEQ ID NO: 1114 - DNA, 71 bp, artificial sequence
  Synthesized
  misc_feature (36)..(36): n=A/G
aaaaaaactctctgcgcacggaccgatcactcgtcnttccgacgctgacgacggcgcatgtactaccggta

SEQ ID NO: 1115 - DNA, 71 bp, artificial sequence
  Synthesized
  misc_feature (36)..(36): n=A/G
tcatcaatcagtctgtgttctttgcaatggtccctngattacctttatgcctgcagtgcccttatgcataa

SEQ ID NO: 1116 - DNA, 71 bp, artificial sequence
  Synthesized
  misc_feature (36)..(36): n=A/G
actattctatggccttgaaggtgcaccctgcaaggngctaatatattgcttaccaccggcattatctgacg

SEQ ID NO: 1117 - DNA, 71 bp, artificial sequence
  Synthesized
  misc_feature (36)..(36): n=A/G
ggcatcatttaatgtttaagatctgcttttcatganagcagggtcagtaatagagtcaagtgttagtatac

SEQ ID NO: 1118 - DNA, 71 bp, artificial sequence
  Synthesized
  misc_feature (36)..(36): n=A/G
acaagcctgtttgggagcgcttttcatctgattctngcaaaaaaaagcgacagatgctcaccaaacgcttc

SEQ ID NO: 1119 - DNA, 71 bp, artificial sequence
  Synthesized
  misc_feature (36)..(36): n=C/T
tttaattcctctcggctagatattataatacggcgnctcaaacgccagatcaaccaacaaaaaaaaactcg

SEQ ID NO: 1120 - DNA, 71 bp, artificial sequence
  Synthesized
  misc_feature (36)..(36): n=C/T
tctgccttctaaacactcctcgtttcctctccaatntcccctactggcaccaaaacccgctacgggtttca

SEQ ID NO: 1121 - DNA, 71 bp, artificial sequence
  Synthesized
  misc_feature (36)..(36): n=A/G
tggacagttttctcgaattttttactttctcagggnaaaaaaaagcagtaccaggagcacatcatcatcct

SEQ ID NO: 1122 - DNA, 71 bp, artificial sequence
  Synthesized
  misc_feature (36)..(36): n=G/T
tctatttatttgcaaaacagcatgtctcgtcacatnttttttatttatatgtcatcttctttcatgtactt

SEQ ID NO: 1123 - DNA, 71 bp, artificial sequence
  Synthesized
  misc_feature (36)..(36): n=A/G
tctcaaaggtactcttgctacatgccgagggtaacnggataataggagtaaccctctttaatttctgtgct

SEQ ID NO: 1124 - DNA, 71 bp, artificial sequence
  Synthesized
  misc_feature (36)..(36): n=A/G
gtagcaacaggattaagtcaagtggagcagaattgnaagttcggggctgacaataaaaaataatggtacta

SEQ ID NO: 1125 - DNA, 71 bp, artificial sequence
  Synthesized
  misc_feature (36)..(36): n=A/G
  misc_feature (36)..(36): n=A/G
ttcgctacctgcaatcgtctgatgagaatatatatnacgaacttttagtctcttctgtgtatgcataagtt

SEQ ID NO: 1126 - DNA, 71 bp, artificial sequence
  Synthesized
  misc_feature (36)..(36): n=A/G
caatgttgtgctactcaactaaaacaaccacaacgntgctatacctttagcgatagttacattgactccgg

SEQ ID NO: 1127 - DNA, 71 bp, artificial sequence
  Synthesized
  misc_feature (36)..(36): n=A/G
gaatggtcgaagactatcacacttgctcaaggttgntttactctttttaagctctctctagcttctacaag

SEQ ID NO: 1128 - DNA, 71 bp, artificial sequence
  Synthesized
  misc_feature (36)..(36): n=A/G
accatcttcaccaaccagcaatgtgtgagacaatantcatgtcgcacgattctaaaattacaagggtcatg

SEQ ID NO: 1129 - DNA, 71 bp, artificial sequence
  Synthesized
  misc_feature (36)..(36): n=C/T
gcagacagtctaacaagagaaggggaaaaatccacngatatcttctaaatagccaggccagttgggtggac

SEQ ID NO: 1130 - DNA, 71 bp, artificial sequence
  Synthesized
  misc_feature (36)..(36): n=A/G
attcacgggcagttattagcaagaacggtgtagcgnagcagctttcagttgaccatgaaccaaacatggag

SEQ ID NO: 1131 - DNA, 71 bp, artificial sequence
  Synthesized
  misc_feature (36)..(36): n=A/G
ggatgaccgggacagagtggagtcgtggggaacagntataggggatggtcgatctccgatgtatggggtgt

SEQ ID NO: 1132 - DNA, 71 bp, artificial sequence
  Synthesized
  misc_feature (36)..(36): n=C/T
gaatagacaagagttcagatgatggtcgtcaatgcnctggaatacaatgaggtcacatgaaaacttacgca

SEQ ID NO: 1133 - DNA, 71 bp, artificial sequence
  Synthesized
  misc_feature (36)..(36): n=A/G
agtacgcgattcatctcatcatcacggcacccggtngtgtccattattgattgattattgttcaccgaggc

SEQ ID NO: 1134 - DNA, 71 bp, artificial sequence
  Synthesized
  misc_feature (36)..(36): n=A/G
tgactgcacgaacgtatgagatgaactcaccagaancgtagctccaccagcggcggaggtggctgaaagaa

SEQ ID NO: 1135 - DNA, 71 bp, artificial sequence
  Synthesized
  misc_feature (36)..(36): n=G/T
ggataccaatacgtacatgtatggaggaggatacanataaatgaaaggttgtggaggacaaacattagtgg

SEQ ID NO: 1136 - DNA, 71 bp, artificial sequence
  Synthesized
  misc_feature (36)..(36): n=C/T
ttagctgggctaagtttgagtgtttgactagttagnttgaggcaagtccaagaacagctcgagtgggccga

SEQ ID NO: 1137 - DNA, 71 bp, artificial sequence
  Synthesized
  misc_feature (36)..(36): n=A/G
gaaaaatctcttccctcacttcacgccatcaccaancagacgcttgcttgcttcttcagagcatatcttca

SEQ ID NO: 1138 - DNA, 71 bp, artificial sequence
  Synthesized
  misc_feature (36)..(36): n=C/T
tgtcccatgacaagttctgacctgattcagcgttgntgcttgctgctgatcattagtcgatctgttgcgaa

SEQ ID NO: 1139 - DNA, 71 bp, artificial sequence
  Synthesized
  misc_feature (36)..(36): n=C/T
acttggcggcgcctctttcattggggagctttgggnttttggagccgccgcggtggtggtgaggtttcagt

SEQ ID NO: 1140 - DNA, 71 bp, artificial sequence
  Synthesized
  misc_feature (36)..(36): n=A/T
acaggggaaatggaaaactgctactggtagcaaacngaacgagaaagtctgcagctaataagacgagtcca

SEQ ID NO: 1141 - DNA, 71 bp, artificial sequence
  Synthesized
  misc_feature (36)..(36): n=C/T
tggtgttgccagaaaggtgtgtgcgtccatccccangcatcgtgttcgtcgaccatgactgcatgccgttt

SEQ ID NO: 1142 - DNA, 71 bp, artificial sequence
  Synthesized
  misc_feature (36)..(36): n=C/T
gttgcagtttaaatgcagatagaactcacgtaaaantttggaaattggaaaaatttctagtatgccaacag

SEQ ID NO: 1143 - DNA, 71 bp, artificial sequence
  Synthesized
  misc_feature (36)..(36): n=A/G
ttattaagcgagcttaaccacgattttgcggggccntggaggccggcgcgggatcccgtgggtgccaacgt

SEQ ID NO: 1144 - DNA, 71 bp, artificial sequence
  Synthesized
  misc_feature (36)..(36): n=C/T
gcaataacaaaaactgcgcaactgtgtaaggacatngtctgatactatttgctttcaaagagtattaaacg

SEQ ID NO: 1145 - DNA, 71 bp, artificial sequence
  Synthesized
  misc_feature (36)..(36): n=G/T
gagaaaagaagacttgtccttttcctgacttcttanaactgggcattttggtggctgtgtagcttatcttc

SEQ ID NO: 1146 - DNA, 71 bp, artificial sequence
  Synthesized
  misc_feature (36)..(36): n=A/G
acaaatgcggagaggctgcttgaacccatgacatgnacaactctcaccgggcccacgcttcagtttttatg

SEQ ID NO: 1147 - DNA, 71 bp, artificial sequence
  Synthesized
  misc_feature (36)..(36): n=C/T
cgcagtttttatctgctagcacaagcattcacctangcgttgtaattgctcttctggcttccccgcctttt

SEQ ID NO: 1148 - DNA, 71 bp, artificial sequence
  Synthesized
  misc_feature (36)..(36): n=A/C
ctgatctggcactagcaggtcctaaaaggcgaacanaacgaactgatagatggcatacatgtacctccacg

SEQ ID NO: 1149 - DNA, 71 bp, artificial sequence
  Synthesized
  misc_feature (36)..(36): n=C/T
agatgaaaatggataagctattatttttaatttttnctgatccgctctaattcatgtgtaataagaataac

SEQ ID NO: 1150 - DNA, 71 bp, artificial sequence
  Synthesized
  misc_feature (36)..(36): n=A/G
aacaggatagagctactcgagaaatgataggtgcancaacaataactgagagggcagaccagagaggcaac

SEQ ID NO: 1151 - DNA, 71 bp, artificial sequence
  Synthesized
  misc_feature (36)..(36): n=C/T
gtcaatggctttaagagaaggcatcaccgaatccgnggattctataacccattgaaagttaaagttattct

SEQ ID NO: 1152 - DNA, 71 bp, artificial sequence
  Synthesized
  misc_feature (36)..(36): n=C/T
gaagcttcaaaccgccttggcctccctggatctggnattgcctgacacagtcatgccacgctcctcgtcgg

SEQ ID NO: 1153 - DNA, 71 bp, artificial sequence
  Synthesized
  misc_feature (36)..(36): n=A/G
cataatcaagtagctaggaaaaatggataccagaanacttttttaacagaataccagtagataatgagcag

SEQ ID NO: 1154 - DNA, 71 bp, artificial sequence
  Synthesized
  misc_feature (36)..(36): n=C/T
tgtatccgtgtctacgcaagcaaagcagagggacgngagtcagcagggtcgctgagatttggcgcccgaga

SEQ ID NO: 1155 - DNA, 71 bp, artificial sequence
  Synthesized
  misc_feature (36)..(36): n=A/G
ttttgtccatcctttattccaattgcactcatggtnggagaatgctaagaggtattttggtcctattatgt

SEQ ID NO: 1156 - DNA, 71 bp, artificial sequence
  Synthesized
  misc_feature (36)..(36): n=G/T
acatatggaattttggcacatttctctaagtttttnatatatttggtgtggataggaaatgatggaccact

SEQ ID NO: 1157 - DNA, 71 bp, artificial sequence
  Synthesized
  misc_feature (36)..(36): n=A/G
catgtggttgctacttgctagagtccaagggcacangtccatgcgtttcagaccctggaagagacacaagg

SEQ ID NO: 1158 - DNA, 71 bp, artificial sequence
  Synthesized
  misc_feature (36)..(36): n=A/C
ctcttctaccggtcagtagtcctcccatattcttgngcacacaagcactcctcccagctcaaaagaatacc

SEQ ID NO: 1159 - DNA, 71 bp, artificial sequence
  Synthesized
  misc_feature (36)..(36): n=A/G
agcttggtgcaggagaaaccatcaagaacaagcttncctacggcatctctcaagacctcatactcctccgt

SEQ ID NO: 1160 - DNA, 71 bp, artificial sequence
  Synthesized
  misc_feature (36)..(36): n=A/C
tctagggtctttagggagatcctgagtatctcatcnatctaacaaatcttagcaatgggatcaaaatctat

SEQ ID NO: 1161 - DNA, 71 bp, artificial sequence
  Synthesized
  misc_feature (36)..(36): n=C/T
tcacaagacggtgatctcatctcatggatccgtcancacgcgtatttgtgattaggattaatacagccgtc

SEQ ID NO: 1162 - DNA, 71 bp, artificial sequence
  Synthesized
  misc_feature (36)..(36): n=C/T
tctgcgactgcctctgaccgctgaccgcactgctcncttctcctgttctctctccccacttcgagacttcc

SEQ ID NO: 1163 - DNA, 71 bp, artificial sequence
  Synthesized
  misc_feature (36)..(36): n=A/G
ctgtccatgagacgaccgacagttgacacctgaatngagttatgcaatattcctcagcgtcttactaagaa

SEQ ID NO: 1164 - DNA, 71 bp, artificial sequence
  Synthesized
  misc_feature (36)..(36): n=A/G
actatttagagcattttgcaaaccgcgacaacaagngactaaaaaaaagcaaatttgccgtctgcaaaacc

SEQ ID NO: 1165 - DNA, 71 bp, artificial sequence
  Synthesized
  misc_feature (36)..(36): n=C/T
ttttgcgtactcaccggacaggttcggtgccatctnagagataattgttggataattaaagatgatatacc

SEQ ID NO: 1166 - DNA, 71 bp, artificial sequence
  Synthesized
  misc_feature (36)..(36): n=A/G
tcgttcaacactctcacttgtggaagttggtcaagngccgaagcagcaaccactatgattaacaaggacat

SEQ ID NO: 1167 - DNA, 71 bp, artificial sequence
  Synthesized
  misc_feature (36)..(36): n=C/T
gtcctgctggactatggagtatccttggactttcgntgtgaatcgatttttctttggtgggcgcttcggac

SEQ ID NO: 1168 - DNA, 71 bp, artificial sequence
  Synthesized
  misc_feature (36)..(36): n=A/G
ggcggttttacacgggcccaacgtcttaacaacgcnctggtggcgacgtgaagccttcgtactccacgcgc

SEQ ID NO: 1169 - DNA, 71 bp, artificial sequence
  Synthesized
  misc_feature (36)..(36): n=G/T
gaccaccttcgctggagccggcaacggtctccttcngcatcttccagtcgctcacaagtggccacaccttg

SEQ ID NO: 1170 - DNA, 71 bp, artificial sequence
  Synthesized
  misc_feature (36)..(36): n=A/C
aggccactatgcctcctgccccaccctcgtcggcgntgcccggcataccgccctccctattaagagtgtaa

SEQ ID NO: 1171 - DNA, 71 bp, artificial sequence
  Synthesized
  misc_feature (36)..(36): n=C/T
tttcaaatgatggcttgttttggtgattttagatgncaatttaaaatattttaagggacagtgctatttta

SEQ ID NO: 1172 - DNA, 71 bp, artificial sequence
  Synthesized
  misc_feature (36)..(36): n=A/G
tatccacaccttcaccagatggtgctcgaaacatcnccgtagatttcgtgagagttgctatacatagctag

SEQ ID NO: 1173 - DNA, 71 bp, artificial sequence
  Synthesized
  misc_feature (36)..(36): n=C/T
aaacggcgaaaggtttatagatcttaatacgacganattagctgcattatttgaaactcatgctaagcgga

SEQ ID NO: 1174 - DNA, 71 bp, artificial sequence
  Synthesized
  misc_feature (36)..(36): n=C/T
acagccaaactgcgtagataaccagctaattagatnagggaaagtaaaagagacagagcgaaggagctcac

SEQ ID NO: 1175 - DNA, 71 bp, artificial sequence
  Synthesized
  misc_feature (36)..(36): n=A/G
ttccattgaagtgaaacaggaataattaagctctcngaaagaacaggccgacgaccttcggttcagcaaca

SEQ ID NO: 1176 - DNA, 71 bp, artificial sequence
  Synthesized
  misc_feature (36)..(36): n=A/C
aatttgagacagaaatcaagaagcgtgggcatgacnggctcgtcgtccatccagcgctgctcaggacaagc

SEQ ID NO: 1177 - DNA, 71 bp, artificial sequence
  Synthesized
  misc_feature (36)..(36): n=C/T
gattagtttggaactaaaccaaagttgattaactcnttgacaatcactcatcatcgtagacacatcataac

SEQ ID NO: 1178 - DNA, 71 bp, artificial sequence
  Synthesized
  misc_feature (36)..(36): n=A/G
ttgttccaccattatattctgtcagtttggcttgtntgtacgatcgacatgcatgctaaatccttccttct

SEQ ID NO: 1179 - DNA, 71 bp, artificial sequence
  Synthesized
  misc_feature (36)..(36): n=G/T
atacatcaaggggagaagaagaacaaaataagaagnatggctaagggatacaagcaacaaggccaccacat

SEQ ID NO: 1180 - DNA, 71 bp, artificial sequence
  Synthesized
  misc_feature (36)..(36): n=A/C
tttcgtctacatcctgttgttcgtcgtcttctcggngacgcgtgttgttgctcttcttcccgaagaccgtt

SEQ ID NO: 1181 - DNA, 71 bp, artificial sequence
  Synthesized
  misc_feature (36)..(36): n=C/T
ggacgcgggagctcggtgggagaagaacaatagtgncgcaggcccagtggtcggcgccaaaataaatgaat

SEQ ID NO: 1182 - DNA, 71 bp, artificial sequence
  Synthesized
  misc_feature (36)..(36): n=A/G
tggttagcacataaatgagttaaggactcacatccngcatctgcaagatgagcttgccgaacgagatttga

SEQ ID NO: 1183 - DNA, 71 bp, artificial sequence
  Synthesized
  misc_feature (36)..(36): n=A/G
aaggggggcgcatgatctaacctgattcgttcatcnagatatcgacgacttccacttctcccccacccttc

SEQ ID NO: 1184 - DNA, 71 bp, artificial sequence
  Synthesized
  misc_feature (36)..(36): n=A/G
gtttattttaaataacaaagatccccatcggatccncccgattcaacactaggggcctagattcgatcctc

SEQ ID NO: 1185 - DNA, 71 bp, artificial sequence
  Synthesized
  misc_feature (36)..(36): n=A/G
aacaaattatcggcgtgcagaggatctggagagctngcgaaggtatgtggcttgtggttcatgaactcccg

SEQ ID NO: 1186 - DNA, 71 bp, artificial sequence
  Synthesized
  misc_feature (36)..(36): n=C/T
ccgtgcgatagagatcgaacggtgcacatcaacacngggagggctgatggctgcgggcggcgccgctcctt

SEQ ID NO: 1187 - DNA, 71 bp, artificial sequence
  Synthesized
  misc_feature (36)..(36): n=C/T
tcgacatagggcctgctcgcggcgagctcggccggngagggattaggatgaggtgcgggccagttacttga

SEQ ID NO: 1188 - DNA, 71 bp, artificial sequence
  Synthesized
  misc_feature (36)..(36): n=C/T
ttagtacaataggttattagagatggcaacgactgntatgcaagcagtgcttctgtgcaagcgtgcaagca

SEQ ID NO: 1189 - DNA, 71 bp, artificial sequence
  Synthesized
  misc_feature (36)..(36): n=C/T
attaacatgtagacaacgtcgttataaatctaacgnaatttgaacggtgcgaaacggacttaaaatacaaa

SEQ ID NO: 1190 - DNA, 71 bp, artificial sequence
  Synthesized
  misc_feature (36)..(36): n=C/T
tgtgtgaatagtttgataacagagaagaagcgcaanattaatgaactgcaactgataatatataatatcag

SEQ ID NO: 1191 - DNA, 71 bp, artificial sequence
  Synthesized
  misc_feature (36)..(36): n=A/T
tgtaattaaacagtaaagcaagatcactgtgcgtgnattgggcttaccaaacttcttctgggccagtaatg

SEQ ID NO: 1192 - DNA, 71 bp, artificial sequence
  Synthesized
  misc_feature (36)..(36): n=A/G
gtcttcattgctgtgcagctatttcatgtcaacaangtccctgaagcacttcccgccatgtcgatcaccat

SEQ ID NO: 1193 - DNA, 71 bp, artificial sequence
  Synthesized
  misc_feature (36)..(36): n=C/T
tcgctctctctgcttctgcttggagttgaaagcaantgtattgtattcaacaaaacgagccgcaatgcgtc

SEQ ID NO: 1194 - DNA, 71 bp, artificial sequence
  Synthesized
  misc_feature (36)..(36): n=G/T
ttagtgcccaacattgccacaccatatgttagtcanattatgctttcttagacaacgagttaggttaatac

SEQ ID NO: 1195 - DNA, 71 bp, artificial sequence
  Synthesized
  misc_feature (36)..(36): n=G/T
gacccttacctccgcgcatcattattggcgccgagnttacacgtttcggcaccaaaataaatggcgccaag

SEQ ID NO: 1196 - DNA, 71 bp, artificial sequence
  Synthesized
  misc_feature (36)..(36): n=A/C
gagtggggtgatggctggtttggtgagaacgatgantcaccgccagactttggagacgacgaagtcaaggt

SEQ ID NO: 1197 - DNA, 71 bp, artificial sequence
  Synthesized
  misc_feature (36)..(36): n=A/G
ccattcactactgactgaataataagctcttagccngatgttagaagacacatattttacttaattaaacc

SEQ ID NO: 1198 - DNA, 71 bp, artificial sequence
  Synthesized
  misc_feature (36)..(36): n=C/T
cacacagccacttccaccgtccgtctgtctgtcagnggtgtgcgcctattgcaggaaatttcatcggcgta

SEQ ID NO: 1199 - DNA, 71 bp, artificial sequence
  Synthesized
  misc_feature (36)..(36): n=G/T
attttgaacctgagtaagcaattcaaattacgcaanaggtcaactccacgtaatttagaccccaccaccac

SEQ ID NO: 1200 - DNA, 71 bp, artificial sequence
  Synthesized
  misc_feature (36)..(36): n=C/T
cgatgaatacaataggatctggtgaggtggatacancaaatatattacaatcgcacgtaagttcaatgctt

SEQ ID NO: 1201 - DNA, 71 bp, artificial sequence
  Synthesized
  misc_feature (36)..(36): n=C/T
tcgccaggaaaaataaagcggatcacctagacgacntcgcagagacatttgcaaacatgagggacgctcga

SEQ ID NO: 1202 - DNA, 71 bp, artificial sequence
  Synthesized
  misc_feature (36)..(36): n=C/T
gtctactatgccgcacttaaaacccaggctcaacanggtggttgggttgagcctaactcgtcatgctgcac

SEQ ID NO: 1203 - DNA, 71 bp, artificial sequence
  Synthesized
  misc_feature (36)..(36): n=A/G
tctatgccatccggacacaatttcttattcttcctnccattgcctgtggcataaaagggattgggacctgc

SEQ ID NO: 1204 - DNA, 71 bp, artificial sequence
  Synthesized
  misc_feature (36)..(36): n=C/G
ccaacgttagctgggatttccccggtgagattgttnatgcccatgccgaggtgtgtgagcgctgacatgtt

SEQ ID NO: 1205 - DNA, 71 bp, artificial sequence
  Synthesized
  misc_feature (36)..(36): n=A/G
caattctagcatcgaagggtgttatgacgcctgctncagatgtggctataccaagaagtccaaaggttaga

SEQ ID NO: 1206 - DNA, 71 bp, artificial sequence
  Synthesized
  misc_feature (36)..(36): n=C/T
cgacgatcaggattaaaacgatgaaggggtatcctntggtccaatctaagccgtcgaaacccaaatctacg

SEQ ID NO: 1207 - DNA, 71 bp, artificial sequence
  Synthesized
  misc_feature (36)..(36): n=A/C
ctctcacatcccccttgcacccttctcttcctcctncatcatcatcgacgatgggtcggttcccatcgtca

SEQ ID NO: 1208 - DNA, 71 bp, artificial sequence
  Synthesized
  misc_feature (36)..(36): n=C/T
agtccctaagttgctgtccaggatgaaagctctttnagattcgtctagtgaatctacattccatgaatagg

SEQ ID NO: 1209 - DNA, 71 bp, artificial sequence
  Synthesized
  misc_feature (36)..(36): n=G/T
ttatttgtaatatagtagtgttaactcttttttttnggtcaaattgtatacacatgaactacaagatatgt

SEQ ID NO: 1210 - DNA, 71 bp, artificial sequence
  Synthesized
  misc_feature (36)..(36): n=G/T
cttatacgtactcctgttaacagtggacggtcaacngtgtgccggaaggcttgaaccaacgcgggatgaat

SEQ ID NO: 1211 - DNA, 71 bp, artificial sequence
  Synthesized
  misc_feature (36)..(36): n=C/T
ttgtgttgtaatagcatagagtaaatgttctacacnaacgtgtactgcgccactgtcagtgtacgccatca

SEQ ID NO: 1212 - DNA, 71 bp, artificial sequence
  Synthesized
  misc_feature (36)..(36): n=C/T
agccttcgctttttgccgtgaggtagtgtacgttcngttgtcttggaacgaagtccctttcaatgttgtgc

SEQ ID NO: 1213 - DNA, 71 bp, artificial sequence
  Synthesized
  misc_feature (36)..(36): n=C/T
tcccttctctgcgggccccgtcatttttacttccangttgggaacccgcgttggctgtcaggcccagccgc

SEQ ID NO: 1214 - DNA, 71 bp, artificial sequence
  Synthesized
  misc_feature (36)..(36): n=C/T
atgtgctgctgtttttttttccagcatactcaaatncgtattgtggccataactcttagctccgaactatg

SEQ ID NO: 1215 - DNA, 71 bp, artificial sequence
  Synthesized
  misc_feature (36)..(36): n=C/T
acgaagtcatagacttacagtatactcatggcctantgagcctagacctgagtctcctgacgacttaagga

SEQ ID NO: 1216 - DNA, 71 bp, artificial sequence
  Synthesized
  misc_feature (36)..(36): n=A/G
ccttcctgctctacgaaaccttgaaggtaggagagncgagggatatgggtccctgatttactgcctatggt

SEQ ID NO: 1217 - DNA, 71 bp, artificial sequence
  Synthesized
  misc_feature (36)..(36): n=A/G
tcatgaagtagcctgttgtttcagggaaatcctcgncggagacctcctgctccgctggctttgtcggctcc

SEQ ID NO: 1218 - DNA, 71 bp, artificial sequence
  Synthesized
  misc_feature (36)..(36): n=A/G
cgagaatatctatcctcactattggtctcattttcnctacttcgttaggcactatggaatctgtttatgga

SEQ ID NO: 1219 - DNA, 71 bp, artificial sequence
  Synthesized
  misc_feature (36)..(36): n=C/T
ctgtcagaaaaaggaaggtgtggacgttctaccganccgactggacggtccgcggcctagcaacaataaca

SEQ ID NO: 1220 - DNA, 71 bp, artificial sequence
  Synthesized
  misc_feature (36)..(36): n=A/G
ctgtcggatcaagatctaacggccgatctcgccctntaccgcttcggcaatggtattttgcccctggaacc

SEQ ID NO: 1221 - DNA, 71 bp, artificial sequence
  Synthesized
  misc_feature (36)..(36): n=A/G
aacatagctgcttcttcatgaagatcatcactgganctatcatcatgacttgagctatcaatgactttctt

SEQ ID NO: 1222 - DNA, 71 bp, artificial sequence
  Synthesized
  misc_feature (36)..(36): n=G/T
ggggaggtggagaatgtgaagtgagtcttgtcaaanacaatgtgatgagagatgatgatcctatgggagga

SEQ ID NO: 1223 - DNA, 71 bp, artificial sequence
  Synthesized
  misc_feature (36)..(36): n=G/T
tccacttggtgagagtgcgtcacaaaggactgaaanaagaaacaacgagaaacgtgtgaatcgcccattag

SEQ ID NO: 1224 - DNA, 71 bp, artificial sequence
  Synthesized
  misc_feature (36)..(36): n=A/G
  misc_feature (36)..(36): n=A/G
atgaacaagtattgcatgacaggtgtattaagtgantgaaaacatataaaaaacacacaagtcatcaaaag

SEQ ID NO: 1225 - DNA, 71 bp, artificial sequence
  Synthesized
  misc_feature (36)..(36): n=C/T
gaattgaatttgttaaagacagataggatagctacngattctagaggcacagttggtggagttgatgatag

SEQ ID NO: 1226 - DNA, 71 bp, artificial sequence
  Synthesized
  misc_feature (36)..(36): n=C/T
gtaccgaaacagaggcagataaggatcctttggcanccagctgagggaacactcagaagaagcgtcggatg

SEQ ID NO: 1227 - DNA, 71 bp, artificial sequence
  Synthesized
  misc_feature (36)..(36): n=G/T
ggagtcttcgtctagagatttgctgactgagacganaggcaagagaagagttagagtaccgaagcgaagag

SEQ ID NO: 1228 - DNA, 71 bp, artificial sequence
  Synthesized
  misc_feature (36)..(36): n=A/G
gcccaaccgggtatgagaatgctagcagtagtaagntgttgacacatttttgtcaccaaacactataatga

SEQ ID NO: 1229 - DNA, 71 bp, artificial sequence
  Synthesized
  misc_feature (36)..(36): n=A/G
actggtattgcattgatgatgagtactcatttatanacatggtgctgcaactgttttgtagttgatctact

SEQ ID NO: 1230 - DNA, 71 bp, artificial sequence
  Synthesized
  misc_feature (36)..(36): n=A/G
agagtgaggtgcagatcttacgaatattggaggtanatattctcgttgtttgtttcacaaaatgtaacgta

SEQ ID NO: 1231 - DNA, 71 bp, artificial sequence
  Synthesized
  misc_feature (36)..(36): n=C/T
ttggagtacaaggcaagataatatggcttggagtanaaggtaattacaaatctaaaagatatacctagata

SEQ ID NO: 1232 - DNA, 71 bp, artificial sequence
  Synthesized
  misc_feature (36)..(36): n=C/T
tgatgcatcatgtgacaaataaagaaggtctgaagngtgttgttagagaaggagccaaggaataatgtcat

SEQ ID NO: 1233 - DNA, 71 bp, artificial sequence
  Synthesized
  misc_feature (36)..(36): n=A/G
ccgcagacgacgccggatcagcgtggtagcccgagnaggcggtggactggccgggaaaataaagcaggatt

SEQ ID NO: 1234 - DNA, 71 bp, artificial sequence
  Synthesized
  misc_feature (36)..(36): n=A/G
agcacaatttagatcttcaattggtttgatgaaaangaccacatcatctgcataaatggaaactctactac

SEQ ID NO: 1235 - DNA, 71 bp, artificial sequence
  Synthesized
  misc_feature (36)..(36): n=G/T
ctccgcccatttctcaattgatccgtaaaatgcatntggaatttgtgcatccaaactaaactaggaaacag

SEQ ID NO: 1236 - DNA, 71 bp, artificial sequence
  Synthesized
  misc_feature (36)..(36): n=A/G
gtttcgagagagcgatggcgatcgatgcggatgctngcagggtgaactccgcacgactcgcgaaagggacg

SEQ ID NO: 1237 - DNA, 71 bp, artificial sequence
  Synthesized
  misc_feature (36)..(36): n=C/T
ttggctttatgaggtgaaaatatggggattgtggtnggaatcgaagaaagtgtagatcgattgaagtacta

SEQ ID NO: 1238 - DNA, 71 bp, artificial sequence
  Synthesized
  misc_feature (36)..(36): n=A/G
agcgcacggggcgcggatgcgcgtggctgacaggtnaggctagggtggatgatcaggattaggtacaattt

SEQ ID NO: 1239 - DNA, 71 bp, artificial sequence
  Synthesized
  misc_feature (36)..(36): n=C/T
agctatggaaacacaagacaaacggatcacaacgtngtgcgcctcatgttaaggtcatttactataattga

SEQ ID NO: 1240 - DNA, 71 bp, artificial sequence
  Synthesized
  misc_feature (36)..(36): n=A/G
gttcttgaggtggttggcgaccacaagaatgggatntgttggtacttgctctcctgggcaagtggatccaa

SEQ ID NO: 1241 - DNA, 71 bp, artificial sequence
  Synthesized
  misc_feature (36)..(36): n=A/G
atattattattatatattccctttgttagcctttcngttttgtaatgattacactaaatcctccatcctcc

SEQ ID NO: 1242 - DNA, 71 bp, artificial sequence
  Synthesized
  misc_feature (36)..(36): n=C/T
gttttatgcagccatagccatctcatacgaagcgcncagctcaactcatgcaggctggaaatacccaaacc

SEQ ID NO: 1243 - DNA, 71 bp, artificial sequence
  Synthesized
  misc_feature (36)..(36): n=A/C
cattttctttgaaggcaagctccgtttggtcagtgnacgtgtccaagagaaccaaacagcgtatggatggc

SEQ ID NO: 1244 - DNA, 71 bp, artificial sequence
  Synthesized
  misc_feature (36)..(36): n=A/C
aaaaagacggcatcttgttcggccttttctacactnttctcacagctggtgaatttttggttctgcattct

SEQ ID NO: 1245 - DNA, 71 bp, artificial sequence
  Synthesized
  misc_feature (36)..(36): n=C/T
gtagccccttgtggaatgaattcatttctttgtaangagtttagattgcaaaaaataaaattgggaggtct

SEQ ID NO: 1246 - DNA, 71 bp, artificial sequence
  Synthesized
  misc_feature (36)..(36): n=A/G
tctccacggcagttgggggtattactgatccacaancagctacggcctggttcgtttgtgctggattgcat

SEQ ID NO: 1247 - DNA, 71 bp, artificial sequence
  Synthesized
  misc_feature (36)..(36): n=A/G
cacctctggccatggcaatggcgccggcgccaggangcgggatgttccagctaggtctagtggacaccacc

SEQ ID NO: 1248 - DNA, 71 bp, artificial sequence
  Synthesized
  misc_feature (36)..(36): n=A/G
cataatttgacttcatttcttttgccggcattttgntaccgcgaagtagcatgaaaaatacaggtgttctg

SEQ ID NO: 1249 - DNA, 71 bp, artificial sequence
  Synthesized
  misc_feature (36)..(36): n=C/T
taacatagtgaggaacttgagaatttataatcatgngtttagcgaccttattattagtgcatagagagtga

SEQ ID NO: 1250 - DNA, 71 bp, artificial sequence
  Synthesized
  misc_feature (36)..(36): n=A/G
gttggctggtggcaccaactcatacactgttgattncttaaagaaagctggtcttttccaatcatcaaatt

SEQ ID NO: 1251 - DNA, 71 bp, artificial sequence
  Synthesized
  misc_feature (36)..(36): n=C/T
ctctgttaaagaagattagaagaaacatatcctctnaacttttttttgaacttcaatcataatgcttctct

SEQ ID NO: 1252 - DNA, 71 bp, artificial sequence
  Synthesized
  misc_feature (36)..(36): n=C/T
caaatccttctgacagacttaatgggtgcatgtttnagttaactgaaactggttgcagtgaatggggtcaa

SEQ ID NO: 1253 - DNA, 71 bp, artificial sequence
  Synthesized
  misc_feature (36)..(36): n=G/T
tcccttccgttcgcgcaatttggtttccttgctcangattgtgcctttgaaatcgtctatgcgggcaacct

SEQ ID NO: 1254 - DNA, 71 bp, artificial sequence
  Synthesized
  misc_feature (36)..(36): n=A/G
taccacacctctcacgtaagatggcgcataggtccnaaaaggatctcttagttatacgcaaactatcatag

SEQ ID NO: 1255 - DNA, 71 bp, artificial sequence
  Synthesized
  misc_feature (36)..(36): n=C/T
gttgaggacactgagaaggtcaagtcgctgagtgcngaagttgaccgcctcaaggtctctccttcacacca

SEQ ID NO: 1256 - DNA, 71 bp, artificial sequence
  Synthesized
  misc_feature (36)..(36): n=G/T
aggcactagttcctcacgaatcaagacacactctanttactccagttaacacaagttacttcagttaagca

SEQ ID NO: 1257 - DNA, 71 bp, artificial sequence
  Synthesized
  misc_feature (36)..(36): n=G/T
ccgaaggattttttgtagatagtgaaaatgtggtanatggtggagatgaagaattgtttgaagatttggtt

SEQ ID NO: 1258 - DNA, 71 bp, artificial sequence
  Synthesized
  misc_feature (36)..(36): n=C/T
ttcacaaaatatcaaatttcatacaccagattcatncacattcacatccacgtacattctcagctgcaacg

SEQ ID NO: 1259 - DNA, 71 bp, artificial sequence
  Synthesized
  misc_feature (36)..(36): n=A/G
attctctgccccctctattcttgcagtacatgaatnccttgacatatttaacaagtgaagccttttctaat

SEQ ID NO: 1260 - DNA, 71 bp, artificial sequence
  Synthesized
  misc_feature (36)..(36): n=A/C
tcaattcgtcatgtttgattgattgccctaatgccntcaatcgaacaacaactgttagccgtcatcaaccc

SEQ ID NO: 1261 - DNA, 71 bp, artificial sequence
  Synthesized
  misc_feature (36)..(36): n=G/T
cgcctgtttgctgctcttcacctggtttcatcatgngaagcacgtacttttaggccatcacgacacgaaca

SEQ ID NO: 1262 - DNA, 71 bp, artificial sequence
  Synthesized
  misc_feature (36)..(36): n=G/T
gcctattgcaccttggcatgcttgggaagcacgtgnaccttgtcacaggtcttgcactactcagccatagt

SEQ ID NO: 1263 - DNA, 71 bp, artificial sequence
  Synthesized
  misc_feature (36)..(36): n=C/T
acctaaggtcattaaagcatcgacagagtaaggccncattacggtggtggcaccagcgatgacatctggaa

SEQ ID NO: 1264 - DNA, 71 bp, artificial sequence
  Synthesized
  misc_feature (36)..(36): n=G/T
gataaaataagtcaaaaagtgaaccgtggaaccttnatcacatccaatctaggtccctggccttgacgatg

SEQ ID NO: 1265 - DNA, 71 bp, artificial sequence
  Synthesized
  misc_feature (36)..(36): n=G/T
ttggacgatctgcagccaacccactgccctcgaacntcacgcacgatgtagtttttagtggaggaataaat

SEQ ID NO: 1266 - DNA, 71 bp, artificial sequence
  Synthesized
  misc_feature (36)..(36): n=A/G
atatgtcaggtacataagctatcacgtgacacaacncaattagtactaggtaacagaattgcgggcgaggc

SEQ ID NO: 1267 - DNA, 71 bp, artificial sequence
  Synthesized
  misc_feature (36)..(36): n=A/G
ggtcggacagcgggctggggcctggggtcatgcatncgagtatggcaagtggcagcagcagctacgaaacc

SEQ ID NO: 1268 - DNA, 71 bp, artificial sequence
  Synthesized
  misc_feature (36)..(36): n=A/G
gagattatgcatgggctgacgtgagcgacggagcancgattgtatatgatgatatcgagctgagcccgcgc

SEQ ID NO: 1269 - DNA, 71 bp, artificial sequence
  Synthesized
  misc_feature (36)..(36): n=G/T
ttaggaagagtaagtttatgttttccattacaaagnggatccttttttattggtgggtgggtgggtggaag

SEQ ID NO: 1270 - DNA, 71 bp, artificial sequence
  Synthesized
  misc_feature (36)..(36): n=C/T
ctccagatcctgaagtttcgcatataagcccccctntttcgttcattaagggtaagttccttatctatcca

SEQ ID NO: 1271 - DNA, 71 bp, artificial sequence
  Synthesized
  misc_feature (36)..(36): n=A/G
aatcacacaattttcaatattgccacactaataaanataagatgaaatgaggaataaaatatgatctccca

SEQ ID NO: 1272 - DNA, 71 bp, artificial sequence
  Synthesized
  misc_feature (36)..(36): n=C/T
tgtgaactgagaacctcgatcggcttttgccctaanaatcaacctgatttgacactagctgcatgcctaga

SEQ ID NO: 1273 - DNA, 71 bp, artificial sequence
  Synthesized
  misc_feature (36)..(36): n=C/T
agtacgcctcggaatcagaggagcagcgaggaagcngaaggaggggcgaatctaagcccaattgaagcatg

SEQ ID NO: 1274 - DNA, 71 bp, artificial sequence
  Synthesized
  misc_feature (36)..(36): n=G/T
ttagatcatgtgaactcgtaactctctgtataaagnaaaaaaaaaacataatgaactcctggcaaagcgat

SEQ ID NO: 1275 - DNA, 71 bp, artificial sequence
  Synthesized
  misc_feature (36)..(36): n=C/T
gatataaaaccgggctaagagattggcaacacccanatccagcatgcgtcagatgtagtacctaccacgcg

SEQ ID NO: 1276 - DNA, 71 bp, artificial sequence
  Synthesized
  misc_feature (36)..(36): n=C/T
cagatttggtgccggcagaataatgtcaaggaaacntcatagtagtttattcgatcagtacgcagatgcag

SEQ ID NO: 1277 - DNA, 71 bp, artificial sequence
  Synthesized
  misc_feature (36)..(36): n=C/T
ctcaagttctacgtcgggtactctgcgtgggaccangaccagctgctgagcgagatcgacgcaggttactg

SEQ ID NO: 1278 - DNA, 71 bp, artificial sequence
  Synthesized
  misc_feature (36)..(36): n=A/G
gtgttgctttttgccgttggcttctgtcctgccatnaattttctactgccagtacatcatcggatgcctga

SEQ ID NO: 1279 - DNA, 71 bp, artificial sequence
  Synthesized
  misc_feature (36)..(36): n=C/T
agacgttttttcttcttcgaattattggcatcatgnttattgctttcaaagttcttggatcatactaccac

SEQ ID NO: 1280 - DNA, 71 bp, artificial sequence
  Synthesized
  misc_feature (36)..(36): n=C/T
tgggagacccttatctatatacatgaatgaacagtngaacacatcaaaattctcttgcagtaagatgaaaa

SEQ ID NO: 1281 - DNA, 71 bp, artificial sequence
  Synthesized
  misc_feature (36)..(36): n=C/T
tgtcgctgaactacaaagtggtcgtaaaaggagaanacaaacatcactgcgatgacacgctcgcagacgaa

SEQ ID NO: 1282 - DNA, 71 bp, artificial sequence
  Synthesized
  misc_feature (36)..(36): n=A/G
ttgcaattgcaacagagcatccaccatggtttcttncctccagtatcaaaaaggaaagtagcttcagcata

SEQ ID NO: 1283 - DNA, 71 bp, artificial sequence
  Synthesized
  misc_feature (36)..(36): n=C/T
taacatcgtatacggatctggttcttcaaatctagnttgacgatataaaccagcatttcctcaacgtcttc

SEQ ID NO: 1284 - DNA, 71 bp, artificial sequence
  Synthesized
  misc_feature (36)..(36): n=A/G
gtgaaagcaactggtacaatgccatttatggtgacngagaccaggaagacgaatggcgtgaacttgaggaa

SEQ ID NO: 1285 - DNA, 71 bp, artificial sequence
  Synthesized
  misc_feature (36)..(36): n=C/T
ttgcaaaaccaccattagcaacaagattcttcgcanagccttttttttcttggtaaccaacattgttcggt

SEQ ID NO: 1286 - DNA, 71 bp, artificial sequence
  Synthesized
  misc_feature (36)..(36): n=C/T
ctagcacaagcgccattcccgctgtaccgaagtacnaatccagcataaatggcaacgaaagccgcatcctt

SEQ ID NO: 1287 - DNA, 71 bp, artificial sequence
  Synthesized
  misc_feature (36)..(36): n=A/C
atctagatcatacataccctaagattgtcattgtcntgtaacgccgtagctggctaatcacacgaattgca

SEQ ID NO: 1288 - DNA, 71 bp, artificial sequence
  Synthesized
  misc_feature (36)..(36): n=A/G
cgcggcgctagtactgcctttgtacggcacatttcnatcaaaggtgtgcttggcatttcgaggagagaccg

SEQ ID NO: 1289 - DNA, 71 bp, artificial sequence
  Synthesized
  misc_feature (36)..(36): n=C/T
acaaaattcccgtaagtaatgaatttctctcattcnttgtctcattgccattatttttttccattgataca

SEQ ID NO: 1290 - DNA, 71 bp, artificial sequence
  Synthesized
  misc_feature (36)..(36): n=G/T
cagatcgaaatagactccatgtgtgtaggagtagcnataaatgtcaacttgtaaaacatgatcccatcatc

SEQ ID NO: 1291 - DNA, 71 bp, artificial sequence
  Synthesized
  misc_feature (36)..(36): n=C/T
aataatcccattgtgaaacaatgattaatggtggcnatgtttgttttacctgagttatgttgaggaattag

SEQ ID NO: 1292 - DNA, 71 bp, artificial sequence
  Synthesized
  misc_feature (36)..(36): n=G/T
gctcaaatggatgggtgcaattttgtaagtgacatnataatagatgggcattaacaaggtacttatgatat

SEQ ID NO: 1293 - DNA, 71 bp, artificial sequence
  Synthesized
  misc_feature (36)..(36): n=A/G
catttatgaccgaaggatctatgatcaacgacccgngagtttaaagtactcagattgccccccatacacac

SEQ ID NO: 1294 - DNA, 71 bp, artificial sequence
  Synthesized
  misc_feature (36)..(36): n=A/G
gatgtccttcaagagaacattaaggtggtgtacacncaattttgcaatgtgtattgagccttaggggaggt

SEQ ID NO: 1295 - DNA, 71 bp, artificial sequence
  Synthesized
  misc_feature (36)..(36): n=C/T
agtgacccttaaatgcaaataaactgcgtatggtgngtcccccaagtccaaactgcatgcatgctaaggta

SEQ ID NO: 1296 - DNA, 71 bp, artificial sequence
  Synthesized
  misc_feature (36)..(36): n=C/T
tcgtccgaagtgacggttctaccctcgcgtttcttncactttttgttctctttccggtcgcccactgttct

SEQ ID NO: 1297 - DNA, 71 bp, artificial sequence
  Synthesized
  misc_feature (36)..(36): n=A/G
tggttcgggcgggccaagatatgtgtgcggcactcntctccttgccattgcttggttttggataggatcgc

SEQ ID NO: 1298 - DNA, 71 bp, artificial sequence
  Synthesized
  misc_feature (36)..(36): n=C/T
cgactatttagtccatttctacgcctttgatcgtangtgtggcatgtgttaatctaggaccaataatcttc

SEQ ID NO: 1299 - DNA, 71 bp, artificial sequence
  Synthesized
  misc_feature (36)..(36): n=A/G
ttttgctgttggtgccatatggcgagccagtaagtnctcgctctccggggagtatttgtggcgaacggcga

SEQ ID NO: 1300 - DNA, 71 bp, artificial sequence
  Synthesized
  misc_feature (36)..(36): n=A/C
aaaaacttcatcgtgtctcacctcacaccacatacntctgcatgtcttctccacctatctcctcgccacat

SEQ ID NO: 1301 - DNA, 71 bp, artificial sequence
  Synthesized
  misc_feature (36)..(36): n=A/C
gctgatcttgcattttgagaattgttgcccctgttntgcttcttgatcgtttcctcaagactacgaccact

SEQ ID NO: 1302 - DNA, 71 bp, artificial sequence
  Synthesized
  misc_feature (36)..(36): n=A/G
gacagggactctgattccactgcgacatactcaacntgatcttcattccgttgcgatccaggattcgagca

SEQ ID NO: 1303 - DNA, 71 bp, artificial sequence
  Synthesized
  misc_feature (36)..(36): n=C/T
agcgcagagctagcaagtgaccgaccgagagcaaanaggcaaggcaacgcaggcaagatggtgcagcaagc

SEQ ID NO: 1304 - DNA, 71 bp, artificial sequence
  Synthesized
  misc_feature (36)..(36): n=A/G
cttctacttgtatcctgacctgcctctgcggatatncctatgcctgggtttaatttcagagattgcttact

SEQ ID NO: 1305 - DNA, 71 bp, artificial sequence
  Synthesized
  misc_feature (36)..(36): n=A/G
cacaaaccaccaagctatgattgccgcctcaagcantggacggcggacatctcaaaggatgtgccgtacat

SEQ ID NO: 1306 - DNA, 71 bp, artificial sequence
  Synthesized
  misc_feature (36)..(36): n=A/G
ccacgcttgtgtcaattgcgatcgagatttgcaaanaccatcacatcctagcttccaatgtggcagcacta

SEQ ID NO: 1307 - DNA, 71 bp, artificial sequence
  Synthesized
  misc_feature (36)..(36): n=A/G
aaatataactaaacttaataaattgtttgcacatanctgaatccaataatatacatcgatgcatatataca

SEQ ID NO: 1308 - DNA, 71 bp, artificial sequence
  Synthesized
  misc_feature (36)..(36): n=A/G
acatcgtggtcaataccaattagcatggtttcaacnccactggtactgactagtgacaggtccatcgatcg

SEQ ID NO: 1309 - DNA, 71 bp, artificial sequence
  Synthesized
  misc_feature (36)..(36): n=A/G
atgaacatgagtgtttatttattctcagcacggtcnatatttgtcatataactaatatattgtacttgcaa

SEQ ID NO: 1310 - DNA, 71 bp, artificial sequence
  Synthesized
  misc_feature (36)..(36): n=A/G
gggatcgtcagttgaattcggtttcttcttgacagncaaaaaaatgtttcttcttctttttcgttcttttt

SEQ ID NO: 1311 - DNA, 71 bp, artificial sequence
  Synthesized
  misc_feature (36)..(36): n=C/T
gacgaaatgacctaatacaggattacaattgtgccntttactgtttacaaattccattagggcagtagcgt

SEQ ID NO: 1312 - DNA, 71 bp, artificial sequence
  Synthesized
  misc_feature (36)..(36): n=G/T
ccttgaaacacaaaagctctgtcgaaatgctggaantttgagaagagaatcgaaaatagcatgcctcgaaa

SEQ ID NO: 1313 - DNA, 71 bp, artificial sequence
  Synthesized
  misc_feature (36)..(36): n=A/C
agactccaaagagatcagataggaccgagctccatnaaaaaaacacctgtttctatgcttccaaaggctcc

SEQ ID NO: 1314 - DNA, 71 bp, artificial sequence
  Synthesized
  misc_feature (36)..(36): n=A/G
ccgacgatgggaacgccgctttctggtacgcaaacncgggttctgatgcgtggatgctgccttgtgtcgag

SEQ ID NO: 1315 - DNA, 71 bp, artificial sequence
  Synthesized
  misc_feature (36)..(36): n=G/T
atgtacaggttcctcaattcaaaatcacatactcgnttgcaaaaacacaacagccgctgttcgcaatgctg

SEQ ID NO: 1316 - DNA, 71 bp, artificial sequence
  Synthesized
  misc_feature (36)..(36): n=A/G
tcctctcttaccaagttaccattgctattgctatcntggtttaggatcattggtgcctctagaggtctcca

SEQ ID NO: 1317 - DNA, 71 bp, artificial sequence
  Synthesized
  misc_feature (36)..(36): n=G/T
gattatttttcccatcattagtttgttaacatgacnatccgagctggtgtaatatgtacctaatatgaagc

SEQ ID NO: 1318 - DNA, 71 bp, artificial sequence
  Synthesized
  misc_feature (36)..(36): n=C/T
accctagatattggctcttagggttgatttagtganaaaggggatcacggaagattgggagagattggaag

SEQ ID NO: 1319 - DNA, 71 bp, artificial sequence
  Synthesized
  misc_feature (36)..(36): n=A/C
taccatacatcctcttttaattggattgatgaaaanaactaagtgttcttatgtactgtttgagcttgcct

SEQ ID NO: 1320 - DNA, 71 bp, artificial sequence
  Synthesized
  misc_feature (36)..(36): n=A/G
ttgttaagaatcaaaacaagcagacaacacgagtcncaatgacaacaaaatgttcagacatagataactaa

SEQ ID NO: 1321 - DNA, 71 bp, artificial sequence
  Synthesized
  misc_feature (36)..(36): n=A/G
aaaaatcctcttgcctgtgaccttcatcacaaactnaacttttggcagtagcagattgtaggagttgggct

SEQ ID NO: 1322 - DNA, 71 bp, artificial sequence
  Synthesized
  misc_feature (36)..(36): n=G/T
acaccttgtgtttgctatgtcaggggagggggggtnccattccaaagccatttgaaaataggatgagcttg

SEQ ID NO: 1323 - DNA, 71 bp, artificial sequence
  Synthesized
  misc_feature (36)..(36): n=C/T
aatcagcactggacaaacgcataacttgagggcaangtctcaaatgcaatttctcaagagatggcatattg

SEQ ID NO: 1324 - DNA, 71 bp, artificial sequence
  Synthesized
  misc_feature (36)..(36): n=C/T
atgagaggaagttgaggaacacaagacacaacaaanagcataaaaatagatgaatcacacgaaatgaaatg

SEQ ID NO: 1325 - DNA, 71 bp, artificial sequence
  Synthesized
  misc_feature (36)..(36): n=G/T
agcactgcgaggagcaaaacaaggaattacttacancgaaacaggaccacactggtattaataagaaagaa

SEQ ID NO: 1326 - DNA, 71 bp, artificial sequence
  Synthesized
  misc_feature (36)..(36): n=A/C
gactacacgtacggaaatgctaccgtacgtataacncaaacacgacatggacggatggacctgttgtggtc

SEQ ID NO: 1327 - DNA, 71 bp, artificial sequence
  Synthesized
  misc_feature (36)..(36): n=A/G
gcgctccttctgcaggcttccttctgctggaaatgntcggtgctgagcctgctatcagaaacctccagcga

SEQ ID NO: 1328 - DNA, 71 bp, artificial sequence
  Synthesized
  misc_feature (36)..(36): n=A/G
cgaccactacacgtaatacttctaataacgccaacntgcagcgtctcgcttttattacagtcttgctttta

SEQ ID NO: 1329 - DNA, 71 bp, artificial sequence
  Synthesized
  misc_feature (36)..(36): n=C/T
ccccttttccattatctaggcattctagtgaaccanataaaattatgcaataaggattgggcttgcattat

SEQ ID NO: 1330 - DNA, 71 bp, artificial sequence
  Synthesized
  misc_feature (36)..(36): n=A/C
aatccgaagtgctgcattgcgcgcgcctttcttcanagaaatcatcatcctagccttttaagctagagtac

SEQ ID NO: 1331 - DNA, 71 bp, artificial sequence
  Synthesized
  misc_feature (36)..(36): n=C/T
gtaccccaccagtcgctcattgcgttacgatctacncactgatgacagttcacggtggagtaagagcgttg

SEQ ID NO: 1332 - DNA, 71 bp, artificial sequence
  Synthesized
  misc_feature (36)..(36): n=A/T
taaagattgctccaaagaggaagatactatacttangcaacagctatatatagacgacgacgttattgatc

SEQ ID NO: 1333 - DNA, 71 bp, artificial sequence
  Synthesized
  misc_feature (36)..(36): n=A/G
gcctggacgaagtatctttcgctagtttgctggctnggccagaggtaagcctgcctgtctgttatggtgtt

SEQ ID NO: 1334 - DNA, 71 bp, artificial sequence
  Synthesized
  misc_feature (36)..(36): n=A/C
ccacgttttgactcatgtgaatcgaattgaaaaaanaagacaggacacaaaagctgaattggaacataggt

SEQ ID NO: 1335 - DNA, 71 bp, artificial sequence
  Synthesized
  misc_feature (36)..(36): n=A/G
taattcattcaatcatccaattcaaaaatatgttcncataacatatgatacatcacttgtgccaccaacta

SEQ ID NO: 1336 - DNA, 71 bp, artificial sequence
  Synthesized
  misc_feature (36)..(36): n=C/T
atctcgtagaattactcgaagtaaggttattgtcanggaacctcccaagatattaggcccacctacagatg

SEQ ID NO: 1337 - DNA, 71 bp, artificial sequence
  Synthesized
  misc_feature (36)..(36): n=G/T
ttgaaagatgtcttggctgcaatgagagctctcctnaattggagttctgtactgacctgaggtttgaaatc

SEQ ID NO: 1338 - DNA, 71 bp, artificial sequence
  Synthesized
  misc_feature (36)..(36): n=C/G
cgatgaaggcacactacttccttcactcggtactanggggtaggattgatgaaaggaacttgagggggacg

SEQ ID NO: 1339 - DNA, 71 bp, artificial sequence
  Synthesized
  misc_feature (36)..(36): n=C/T
gattcttgtactaaatcacatgttccaatcctatcnacgatggtgttaaaaacaatgtaagtagtttgatt

SEQ ID NO: 1340 - DNA, 71 bp, artificial sequence
  Synthesized
  misc_feature (36)..(36): n=C/T
atacaaatcacgattataaaaaagaaagataacatncgatcataaaacttggtccgtagctatcatataaa

SEQ ID NO: 1341 - DNA, 71 bp, artificial sequence
  Synthesized
  misc_feature (36)..(36): n=A/C
aattagattttattttgggaagccaacgttgctaanttaaccatgaggaacttagttatgatactaaaaag

SEQ ID NO: 1342 - DNA, 71 bp, artificial sequence
  Synthesized
  misc_feature (36)..(36): n=C/T
cgtaatggggaatcagggaatggatcactggtgccnggtagtataatatattaataggtggttacttaagt

SEQ ID NO: 1343 - DNA, 71 bp, artificial sequence
  Synthesized
  misc_feature (36)..(36): n=G/T
aaaataaacacatccaagacttgagagaggaaatanaaaagatgaaaacaagtcacaatgatgaagtctct

SEQ ID NO: 1344 - DNA, 71 bp, artificial sequence
  Synthesized
  misc_feature (36)..(36): n=C/T
ggtatagccatggaagcttgtacagcttgcagccangctttcccggcttctctataaaatgcaggcactgc

SEQ ID NO: 1345 - DNA, 71 bp, artificial sequence
  Synthesized
  misc_feature (36)..(36): n=G/T
accgcagaggtcgcccctacgcatccatccatcttntagtgacactctcccccctcaatgaagcgactccc

SEQ ID NO: 1346 - DNA, 71 bp, artificial sequence
  Synthesized
  misc_feature (36)..(36): n=A/G
gtccggccgtggcgctggcgtggattggcacgcacngagcggccaatagtgtgccctatggttcagacccg

SEQ ID NO: 1347 - DNA, 71 bp, artificial sequence
  Synthesized
  misc_feature (36)..(36): n=C/T
ctcattattcttgtggatagctacctgttctggagnattgtccctggcttcaaccactgcaaatggtacaa

SEQ ID NO: 1348 - DNA, 71 bp, artificial sequence
  Synthesized
  misc_feature (36)..(36): n=C/T
gtgttgtcttagtgacctcgctttcttctccctcangagacacccttgcagtcgaacacactctggccatt

SEQ ID NO: 1349 - DNA, 71 bp, artificial sequence
  Synthesized
  misc_feature (36)..(36): n=A/C
actcaattactatgccacacaccaagctcgcaacgnggcgaatcattctaatgacttgattcatgtgtaag

SEQ ID NO: 1350 - DNA, 71 bp, artificial sequence
  Synthesized
  misc_feature (36)..(36): n=A/G
ggcaggacaagacttgccatcctcaagtacagaccncgacgaagaacagcacgccactgacaaggtagaga

SEQ ID NO: 1351 - DNA, 71 bp, artificial sequence
  Synthesized
  misc_feature (36)..(36): n=C/T
gaaatcagcttagccggtttttctgcacagcagctngaggcgatcccaaaaggtgatttttggttaaatca

SEQ ID NO: 1352 - DNA, 71 bp, artificial sequence
  Synthesized
  misc_feature (36)..(36): n=A/G
tggagcgccactggcgattttaagataaggcacggncgattgctgcctagtcagcagtcactcatgagcac

SEQ ID NO: 1353 - DNA, 71 bp, artificial sequence
  Synthesized
  misc_feature (36)..(36): n=A/G
cgtgtttctctacttgacggaagaacttgccccacnttcaacagacgacgtgatttttactaaaaatattg

SEQ ID NO: 1354 - DNA, 71 bp, artificial sequence
  Synthesized
  misc_feature (36)..(36): n=G/T
gttcggttattagcccacgcgtgcagaaagtggaancagaccaagaagtgggaacctaattgccttgtttg

SEQ ID NO: 1355 - DNA, 71 bp, artificial sequence
  Synthesized
  misc_feature (36)..(36): n=A/C
atgctttggatattggatttgaatatggatatactnctgtgatgtggtatgctgcttgtgcttggctaatt

SEQ ID NO: 1356 - DNA, 71 bp, artificial sequence
  Synthesized
  misc_feature (36)..(36): n=A/G
gtcactgaaaggtgttaaggctgctgggtatgaacngatgactgctgttcaggaggctactcttcctatta

SEQ ID NO: 1357 - DNA, 71 bp, artificial sequence
  Synthesized
  misc_feature (36)..(36): n=C/T
ctctgtgttcgtaattaatttgcatttgctcttgcntgatcaaatcaaaagcgatcgataacctatacaca

SEQ ID NO: 1358 - DNA, 71 bp, artificial sequence
  Synthesized
  misc_feature (36)..(36): n=A/G
ctccatccctatctaccaaagctaatgttcacacgntttcccctaattaattggttaataccagtgtaata

SEQ ID NO: 1359 - DNA, 71 bp, artificial sequence
  Synthesized
  misc_feature (36)..(36): n=A/G
cagtggtaaacagaacggtacattgaatattttctnggaaaaaactaggctatacacatgatgaatacaga

SEQ ID NO: 1360 - DNA, 71 bp, artificial sequence
  Synthesized
  misc_feature (36)..(36): n=C/T
aaccggcagagcactggcacacattataaaatttcncgaggcgactacggcgaggcatcgacttcgccatg

SEQ ID NO: 1361 - DNA, 71 bp, artificial sequence
  Synthesized
  misc_feature (36)..(36): n=A/G
agtgtatttgaaaatatattaggagaggtggaagcnccgttttgaaagttgatgcatagtggaaggattgt

SEQ ID NO: 1362 - DNA, 71 bp, artificial sequence
  Synthesized
  misc_feature (36)..(36): n=A/C
tgtatataattggtaggaaacttggtccaaagatcntatcttctaatctgagttctcagactttgttccaa

SEQ ID NO: 1363 - DNA, 71 bp, artificial sequence
  Synthesized
  misc_feature (36)..(36): n=A/G
aaaaaccgagatgacaacacgaggttgaagtgtttnattggaaggtaagttagtgataggttagaggtctt

SEQ ID NO: 1364 - DNA, 71 bp, artificial sequence
  Synthesized
  misc_feature (36)..(36): n=A/G
taaaatttgaagacatttaaattgtacgtgggcatntaattacccactgataaagcgaatgactgtaacag

SEQ ID NO: 1365 - DNA, 71 bp, artificial sequence
  Synthesized
  misc_feature (36)..(36): n=A/G
tgcgccccgtcatggaagctgtgggctgtgctcatntcactccccaagtccctagaccctagtcctcgttg

SEQ ID NO: 1366 - DNA, 71 bp, artificial sequence
  Synthesized
  misc_feature (36)..(36): n=A/G
gcttgttcgactattgacaatatcgttgcattcttntttgcgacagagttctcgaagcaaaacgatcggat

SEQ ID NO: 1367 - DNA, 71 bp, artificial sequence
  Synthesized
  misc_feature (36)..(36): n=C/T
gagtacctcggcggcactccgcagccattcgtcganctctccaccaatttctacaccaggtccgtccatcg

SEQ ID NO: 1368 - DNA, 71 bp, artificial sequence
  Synthesized
  misc_feature (36)..(36): n=C/T
aaaaagaaagacaaaataaaacataaatgtagaggnagaatatactagttgtgcattaattaataaatgtt

SEQ ID NO: 1369 - DNA, 71 bp, artificial sequence
  Synthesized
  misc_feature (36)..(36): n=C/T
aactaacctcagaacacctgatattctctctttagnagttggcatagctcacccttcagccagaccacccg

SEQ ID NO: 1370 - DNA, 71 bp, artificial sequence
  Synthesized
  misc_feature (36)..(36): n=A/G
aaataagagaagctttacttcaagtatctgataccnataatgatgagataataagtagtgaggctaattcc

SEQ ID NO: 1371 - DNA, 71 bp, artificial sequence
  Synthesized
  misc_feature (36)..(36): n=A/G
ccatcacgagtaaatccggtggcggagccggagagngctcgatgccgatcacgagcgatccaagcatccaa

SEQ ID NO: 1372 - DNA, 71 bp, artificial sequence
  Synthesized
  misc_feature (36)..(36): n=C/T
ggagatgatccacaggtcccacggagtcgtgggcgngtgcgaggatgactcagaggacccacacaccagtg

SEQ ID NO: 1373 - DNA, 71 bp, artificial sequence
  Synthesized
  misc_feature (36)..(36): n=A/G
tcccttcaaccttccaccgagtttaccatgaagccncgcgcatgcctcatgacggactcgtcgtggaaatc

SEQ ID NO: 1374 - DNA, 71 bp, artificial sequence
  Synthesized
  misc_feature (36)..(36): n=A/C
gatcaaggcctgacctcaccttggaagcttggatangaaagcagaacaacaatcctggaggctgctgagtg

SEQ ID NO: 1375 - DNA, 71 bp, artificial sequence
  Synthesized
  misc_feature (36)..(36): n=A/G
acctctagacaaaggcgacaacgtttctcgacgctngagcttcaagatccgggcgcgttacagcaagattc

SEQ ID NO: 1376 - DNA, 71 bp, artificial sequence
  Synthesized
  misc_feature (36)..(36): n=A/G
ccaggtggcacacgcggtgatgctgcaatcgttgcngcacatgacgatgtcaagaagattgccggagaggg

SEQ ID NO: 1377 - DNA, 71 bp, artificial sequence
  Synthesized
  misc_feature (36)..(36): n=C/T
agttcaaacactatctattaccgaatgacttccatnatcctgtagttcacctacatgcaaggaggatcaac

SEQ ID NO: 1378 - DNA, 71 bp, artificial sequence
  Synthesized
  misc_feature (36)..(36): n=A/G
acgcccattgattgatggaggactgacccctcgccntctcggtatcgacgcgcgtctcgagtcggggtgtt

SEQ ID NO: 1379 - DNA, 71 bp, artificial sequence
  Synthesized
  misc_feature (36)..(36): n=A/T
atacctcgatgtctctaccattccctaatccaatcntaaatgataataaatagtttgaaaggtgtcaagtt

SEQ ID NO: 1380 - DNA, 71 bp, artificial sequence
  Synthesized
  misc_feature (36)..(36): n=C/T
gggtggagcttcaagcctatagaggaatccctccgngacactgttgaatcctacaaagcatttggcatcct

SEQ ID NO: 1381 - DNA, 71 bp, artificial sequence
  Synthesized
  misc_feature (36)..(36): n=A/T
ttcaattttgcgctttggagttggaaatgaaatttngcattctttcttctatgaatcagggaattatgtga

SEQ ID NO: 1382 - DNA, 71 bp, artificial sequence
  Synthesized
  misc_feature (36)..(36): n=G/T
aaagcctgacctattttagtcgccaaaataacacgnagtagtagtagcacacacgcatagtggcgtaatga

SEQ ID NO: 1383 - DNA, 71 bp, artificial sequence
  Synthesized
  misc_feature (36)..(36): n=C/T
cggacgctgaaggatcggatcccgaatatgcggtcnccttcgatgtcaggtatatcctacgagaaatggca

SEQ ID NO: 1384 - DNA, 71 bp, artificial sequence
  Synthesized
  misc_feature (36)..(36): n=C/T
tttatttctcgtcgtagagaaaatttattcgctcantgtattaagtaaagataaagatttgattctctctg

SEQ ID NO: 1385 - DNA, 71 bp, artificial sequence
  Synthesized
  misc_feature (36)..(36): n=C/T
tgttttggcacatgtgtatcaggcgaaggttacttnaacttggtcatgtagcaaagccttcaccctcgccc

SEQ ID NO: 1386 - DNA, 71 bp, artificial sequence
  Synthesized
  misc_feature (36)..(36): n=C/T
acaaagaaatgaagtcatcagaattgtagaagtatnttacatacaaataaatattctgttagggaatctga

SEQ ID NO: 1387 - DNA, 72 bp, artificial sequence
  Synthesized
  misc_feature (36)..(36): n=A/C
aatggatggcctacaagccactaaacatatccgttacttttgagaataccggctgttgggacgtttctgtaa

SEQ ID NO: 1388 - DNA, 72 bp, artificial sequence
  Synthesized
  misc_feature (36)..(36): n=C/T
ataatgtcagacaggtaattccagcacacgtaaatctagtaataaacacacattcttgcatggaccaacaag

SEQ ID NO: 1389 - DNA, 71 bp, artificial sequence
  Synthesized
  misc_feature (36)..(36): n=C/T
aagatcaaacatatacgacgaattaattaacttgancattttgaattaagttgaattcctgtgtaacatga

SEQ ID NO: 1390 - DNA, 71 bp, artificial sequence
  Synthesized
  misc_feature (36)..(36): n=A/C
agtactagtacgcagttacttccctttaattaattncatgggtgcgagatgctgcattagcatctgtggta

SEQ ID NO: 1391 - DNA, 71 bp, artificial sequence
  Synthesized
  misc_feature (36)..(36): n=C/T
aggccctttacacccacgtacggcccggccaccagncaccagcccaaaacagagctctcaaatcgaaaccc

SEQ ID NO: 1392 - DNA, 71 bp, artificial sequence
  Synthesized
  misc_feature (36)..(36): n=C/T
acatgaaatctactttttggagtcaaacacttctcnatttagcatagagcagcttcgcaaagttcatatat

SEQ ID NO: 1393 - DNA, 71 bp, artificial sequence
  Synthesized
  misc_feature (36)..(36): n=A/G
tatacaacgctgctttctaccaagttaaacgagctnatgtttctttttttttatcatcaaaatcgactgca

SEQ ID NO: 1394 - DNA, 71 bp, artificial sequence
  Synthesized
  misc_feature (36)..(36): n=A/C
aagtccaagaagttggaacctgaaccggaagccagngatgttagagaggtttttagtttttacgtttctaa

SEQ ID NO: 1395 - DNA, 71 bp, artificial sequence
  Synthesized
  misc_feature (36)..(36): n=A/C
gcagaaggccggccggctactcgaaaacaagaacanaggaatcacagctggggcgctatacctacacacct

SEQ ID NO: 1396 - DNA, 71 bp, artificial sequence
  Synthesized
  misc_feature (36)..(36): n=C/T
aaaatactacacttttaaacagggcctatatgtggnggtggaactacgtggaactaaccctcttatcatgg

SEQ ID NO: 1397 - DNA, 71 bp, artificial sequence
  Synthesized
  misc_feature (36)..(36): n=C/T
aacattaattttacaaatacaatgtcattcatttcnagaacatcaaaatttagttgctgaaatgagcttat

SEQ ID NO: 1398 - DNA, 71 bp, artificial sequence
  Synthesized
  misc_feature (36)..(36): n=A/G
gaccgatgctcgtcgacacgggtacggggcgagtcngtctgagatacggtggcacttgccacgcttaggtt

SEQ ID NO: 1399 - DNA, 71 bp, artificial sequence
  Synthesized
  misc_feature (36)..(36): n=A/C
tctaagtgtctccgcagccatttgagggacaaccgntatagcaatgctatcatgcacgcatatgcatatgg

SEQ ID NO: 1400 - DNA, 71 bp, artificial sequence
  Synthesized
  misc_feature (36)..(36): n=G/T
ataatagtttaattcgtgggtcgtaattttgtttcngacttgaaacgcttgcgcaggcagacaggcaggcc

SEQ ID NO: 1401 - DNA, 71 bp, artificial sequence
  Synthesized
  misc_feature (36)..(36): n=C/T
ggacgctatttgcaagctgaaatcgacgtaggcggngaaatcgcagtagcaaagactgctgggccagtaga

SEQ ID NO: 1402 - DNA, 71 bp, artificial sequence
  Synthesized
  misc_feature (36)..(36): n=C/T
ggcatcgataatgacgaaatgatggcttgcgcttcnagcctccgactgcattcaaggcatcgataatggca

SEQ ID NO: 1403 - DNA, 71 bp, artificial sequence
  Synthesized
  misc_feature (36)..(36): n=C/T
gacagcaaatatggtttcaacttcgaggttgcaaanagtgaacattgtagtaataggatctacaagggtga

SEQ ID NO: 1404 - DNA, 71 bp, artificial sequence
  Synthesized
  misc_feature (36)..(36): n=C/T
caactctaatcgatatactccctctccctcgtcgcntcgaccacatatagaactcgtccattgcttcgtcg

SEQ ID NO: 1405 - DNA, 71 bp, artificial sequence
  Synthesized
  misc_feature (36)..(36): n=C/T
ttgatttctcttgtgttggttatacatatttctttngcgaaggaatgacaaggcactaattagcgctagcg

SEQ ID NO: 1406 - DNA, 71 bp, artificial sequence
  Synthesized
  misc_feature (36)..(36): n=C/G
ccggaccagatcttcagaccagcaaagcaaggagangatgccgtgccaatgccatgctccagttgggtggc

SEQ ID NO: 1407 - DNA, 71 bp, artificial sequence
  Synthesized
  misc_feature (36)..(36): n=C/T
tccagtttaaccaactggtcatggcaaatcctgaancccgttgttaggtgattactaccggcaaacctttt

SEQ ID NO: 1408 - DNA, 71 bp, artificial sequence
  Synthesized
  misc_feature (36)..(36): n=C/T
ccttttcctaaagacgtacagatacgatcgaggcantacacagacacgtacgctggtgacacgtaacaata

SEQ ID NO: 1409 - DNA, 71 bp, artificial sequence
  Synthesized
  misc_feature (36)..(36): n=C/T
ctgatctgctgaattctttcgttcctaacagttttncccccaaccacaagaaattgaagaattgaaaagtg

SEQ ID NO: 1410 - DNA, 71 bp, artificial sequence
  Synthesized
  misc_feature (36)..(36): n=A/C
ctcagctataatctgaagcggtcatttcaaaaagantgtcgcaccatcacctaaacaacgggctactcttc

SEQ ID NO: 1411 - DNA, 71 bp, artificial sequence
  Synthesized
  misc_feature (36)..(36): n=C/T
ataagaaaaattaatggtcaaaaacttttgtatganttttttctctcgtctaatatgattaacatttttcg

SEQ ID NO: 1412 - DNA, 71 bp, artificial sequence
  Synthesized
  misc_feature (36)..(36): n=C/T
tatcattagtggaagcccttcttttgttactttttntataccttgtacgcttattgacatgtcctcattag

SEQ ID NO: 1413 - DNA, 71 bp, artificial sequence
  Synthesized
  misc_feature (36)..(36): n=A/G
cataagttcattgtatataagcaagtaaatacaggnaaatgttccctttttgagaggaagatacataaaaa

SEQ ID NO: 1414 - DNA, 71 bp, artificial sequence
  Synthesized
  misc_feature (36)..(36): n=A/G
gggtgagattgtgtatagaacacttttgggcttttngccaattgtgttgctgcagccacataaaaaatcag

SEQ ID NO: 1415 - DNA, 71 bp, artificial sequence
  Synthesized
  misc_feature (36)..(36): n=C/T
gatgatgcacggaacccaactgaacgaaagacgagntgatatggcattgtttgccgcgcaacgcatccgtc

SEQ ID NO: 1416 - DNA, 71 bp, artificial sequence
  Synthesized
  misc_feature (36)..(36): n=A/C
tcgagatgtgctagaccggacgctcaactaccgggntgtcgtcgtcggttcgctgtcgggttatttgaact

SEQ ID NO: 1417 - DNA, 71 bp, artificial sequence
  Synthesized
  misc_feature (36)..(36): n=C/T
atcaatcatcctcagttcagctagcgaagtgatacnatgagtgctacatctatgtaacttcatgccatgtt

SEQ ID NO: 1418 - DNA, 71 bp, artificial sequence
  Synthesized
  misc_feature (36)..(36): n=C/T
cacatgatgtgcttggaagaattcttagacgtgggntcttggatgttgaagtagattaaagaagaaaactt

SEQ ID NO: 1419 - DNA, 71 bp, artificial sequence
  Synthesized
  misc_feature (36)..(36): n=C/T
gttgtgtggcacgattgcgacattattgatcttgangattctgtgaatccatggatataacgtagtgtgtg

SEQ ID NO: 1420 - DNA, 71 bp, artificial sequence
  Synthesized
  misc_feature (36)..(36): n=A/G
gttgggctaaagtctgttggcgcatagtgaagctgngtttagaagaaaaaaaaggtgacgatggtgatggt

SEQ ID NO: 1421 - DNA, 71 bp, artificial sequence
  Synthesized
  misc_feature (36)..(36): n=G/T
tatgcacctggacagagccgtagtcccttatatttnataggatgaaggcagtacatgttgtatggtagtag

SEQ ID NO: 1422 - DNA, 71 bp, artificial sequence
  Synthesized
  misc_feature (36)..(36): n=A/G
gtgaccatatgttggggctgcaagttaagaataatnttaaaacaatttatcagatgacttgctgaataaaa

SEQ ID NO: 1423 - DNA, 71 bp, artificial sequence
  Synthesized
  misc_feature (36)..(36): n=C/T
caaagcatgaatgctaaaagttactgaaagtgaatngctaaactttagcacccaacaacagtttagctact

SEQ ID NO: 1424 - DNA, 71 bp, artificial sequence
  Synthesized
  misc_feature (36)..(36): n=A/C
gtatgtatctcacctgacacagatgtggcctccagncaggtgtaggatatggatgctgtggacataaaaag

SEQ ID NO: 1425 - DNA, 71 bp, artificial sequence
  Synthesized
  misc_feature (36)..(36): n=A/G
cgtctatgaggctatgacagattagtcatgtggcgngagtacagaacacgcgtgacaggttagcaaccacc

SEQ ID NO: 1426 - DNA, 71 bp, artificial sequence
  Synthesized
  misc_feature (36)..(36): n=C/T
ctttgtggaatcacagactctctgtttcagaaagcntgacgttttcacccaaagggtagcttaggctagcc

SEQ ID NO: 1427 - DNA, 71 bp, artificial sequence
  Synthesized
  misc_feature (36)..(36): n=A/G
gtgcggcaactcgaaactcgtgtgtcttggttacanaaattaacgacgaccctcggtgccagaagcatgag

SEQ ID NO: 1428 - DNA, 71 bp, artificial sequence
  Synthesized
  misc_feature (36)..(36): n=A/C
ataattttggaagaacgcactgttgcaatgcatgcntgacgttttccatccaactgctagggtccagcacg

SEQ ID NO: 1429 - DNA, 71 bp, artificial sequence
  Synthesized
  misc_feature (36)..(36): n=A/G
gctatacattgaactccctgttcactagcagcatcnttgacaacaaaagcaccagctttcgctgcaggacc

SEQ ID NO: 1430 - DNA, 71 bp, artificial sequence
  Synthesized
  misc_feature (36)..(36): n=C/T
cttgtactagcgctgctctgttcttagcagctcaangtaaaaaagcaactttgttatagctcaatgtataa

SEQ ID NO: 1431 - DNA, 71 bp, artificial sequence
  Synthesized
  misc_feature (36)..(36): n=A/G
tctccagcacgtccaccaccggttcacttcctcatntgttcaggaacgatccgatggacaagctcgattgg

SEQ ID NO: 1432 - DNA, 71 bp, artificial sequence
  Synthesized
  misc_feature (36)..(36): n=A/G
gtccgtaaagcggttctagggtgtcgcattatgggnataagggaatgaaaaggcggctggttgtgggcgga

SEQ ID NO: 1433 - DNA, 71 bp, artificial sequence
  Synthesized
  misc_feature (36)..(36): n=C/T
gaattcagctagatgcttccttcgcctctggcctcngccttcactcaagttcttggatgttatcgttgcca

SEQ ID NO: 1434 - DNA, 71 bp, artificial sequence
  Synthesized
  misc_feature (36)..(36): n=A/G
ccgctcatgacgtagttcctctgatccacgttgccnaagaaagaaccttccattttttgatgcacaagcga

SEQ ID NO: 1435 - DNA, 71 bp, artificial sequence
  Synthesized
  misc_feature (36)..(36): n=G/T
agagagaaagccctatgtttggttttgttagtgctntttctttgctggtcaaaacaaatatagtgcttgat

SEQ ID NO: 1436 - DNA, 71 bp, artificial sequence
  Synthesized
  misc_feature (36)..(36): n=C/T
ccatgaggtatacgaggcagagcccttcggccagtngtgtctctcgtggctagaggtccaaatcacgtttg

SEQ ID NO: 1437 - DNA, 71 bp, artificial sequence
  Synthesized
  misc_feature (36)..(36): n=C/T
ggtggtgtccgagcaggtcgtttcatggttagtacntcggccaaattgataaccatagtgtaattccacgt

SEQ ID NO: 1438 - DNA, 71 bp, artificial sequence
  Synthesized
  misc_feature (36)..(36): n=A/T
aatgtgccccatcatgtgggcaaatgccataatggnttgcagtctctttctgtactttatcacggtaaatt

SEQ ID NO: 1439 - DNA, 71 bp, artificial sequence
  Synthesized
  misc_feature (36)..(36): n=C/T
gtggtggcggccgacgtacgtgcaagcagattgatnagaaagagagaggatggattggttggttgttgtta

SEQ ID NO: 1440 - DNA, 71 bp, artificial sequence
  Synthesized
  misc_feature (36)..(36): n=A/G
aacttaatttcctgcagaataagaatgtcaaaagcntcagaatattcaacttgggaagatcatcacgacat

SEQ ID NO: 1441 - DNA, 71 bp, artificial sequence
  Synthesized
  misc_feature (36)..(36): n=A/G
aatctctgcttgatgctggtggatagtgggggaagntttcgatgagcggctgctggtggagccggggagag

SEQ ID NO: 1442 - DNA, 71 bp, artificial sequence
  Synthesized
  misc_feature (36)..(36): n=C/T
taatttcgtttcagtgattcacagtacctagctcgngaaaccacaaattcagctggactagtcctgcagga

SEQ ID NO: 1443 - DNA, 71 bp, artificial sequence
  Synthesized
  misc_feature (36)..(36): n=C/T
ccccattattatttttccatcaatctcaatattccnttggatctctctctttcaaaggcaagggtacacta

SEQ ID NO: 1444 - DNA, 71 bp, artificial sequence
  Synthesized
  misc_feature (36)..(36): n=C/T
gcttgccttgtcacttagcaggtctgtattgcttgntcggtgcctggcaccttctgtaacattgtttttga

SEQ ID NO: 1445 - DNA, 71 bp, artificial sequence
  Synthesized
  misc_feature (36)..(36): n=C/T
gtcccaacttcgaggttccaacgatgatgaattcanggtttaatggtggtggcaagcttttctcccccctg

SEQ ID NO: 1446 - DNA, 71 bp, artificial sequence
  Synthesized
  misc_feature (36)..(36): n=C/T
tggaaatcaatttccaccggtggtttttaactaacngccaatgaaaagaccgatttctacatacccttagt

SEQ ID NO: 1447 - DNA, 71 bp, artificial sequence
  Synthesized
  misc_feature (36)..(36): n=A/C
cgtactggacgaccaaaacgctctgagtattctatnttcaacaagaaataccacggaaaaacgcggccata

SEQ ID NO: 1448 - DNA, 71 bp, artificial sequence
  Synthesized
  misc_feature (36)..(36): n=A/G
acgtatctacaaccgcttgtacgcggtccagttgantggaacaaatgatgctattcttcttgaagctgcta

SEQ ID NO: 1449 - DNA, 71 bp, artificial sequence
  Synthesized
  misc_feature (36)..(36): n=C/T
tagctatcgaccggtcactgacgtgcgagaccagcngttgcttcgccccgtacctcagtggctgtaagtta

SEQ ID NO: 1450 - DNA, 71 bp, artificial sequence
  Synthesized
  misc_feature (36)..(36): n=C/T
ctcaacaacacccacaccacaagaacttgatcgttnttccacaaattcaaagaggagagggaagaagtgaa

SEQ ID NO: 1451 - DNA, 71 bp, artificial sequence
  Synthesized
  misc_feature (36)..(36): n=A/G
ctcccccaattgctacctgtggttcactcctatctntgcttgctgctacatgttatttgaatttcaagttg

SEQ ID NO: 1452 - DNA, 71 bp, artificial sequence
  Synthesized
  misc_feature (36)..(36): n=A/G
aatgctagtacactttggacatcctagagtgtgctngcacggtggactgtaagtcgtgtgctacttcggtg

SEQ ID NO: 1453 - DNA, 71 bp, artificial sequence
  Synthesized
  misc_feature (36)..(36): n=A/G
cagactcgctaaagggacacgtatgccggacaaacngagcggtacgcatactgggagtacgattatgcacg

SEQ ID NO: 1454 - DNA, 71 bp, artificial sequence
  Synthesized
  misc_feature (36)..(36): n=A/G
taacaacaccaaaacgtgcgaagacgctaccatctncaactcagcgcatacaccacaatgaaagacacatc

SEQ ID NO: 1455 - DNA, 71 bp, artificial sequence
  Synthesized
  misc_feature (36)..(36): n=G/T
cgtactcctggtatggcatatcttctcgctcatttntcatatggacccctgtagttagtccatcgctaaca

SEQ ID NO: 1456 - DNA, 71 bp, artificial sequence
  Synthesized
  misc_feature (36)..(36): n=C/T
aactgaaggtatcacaaaaataagttgtatttgctnattgccaaaaatcaagtcatatcaaagcaggtagg

SEQ ID NO: 1457 - DNA, 72 bp, artificial sequence
  Synthesized
  misc_feature (36)..(36): n=G/T
cgtttcggttgcgtcaactttctaatagcctcgccgtgtgtgttaaaacattattttgtcgcgacacaagtt

SEQ ID NO: 1458 - DNA, 71 bp, artificial sequence
  Synthesized
  misc_feature (36)..(36): n=A/G
gtggtcgccgatgaaatatctccggtcaggctccancaaggttcgcggaatcatgacacggcccgtagtta

SEQ ID NO: 1459 - DNA, 71 bp, artificial sequence
  Synthesized
  misc_feature (36)..(36): n=A/G
tttgaaaaccataatgtcagagaggaaaatcaccanctgtgtggtggaacacacccgccctaaatcctaag

SEQ ID NO: 1460 - DNA, 71 bp, artificial sequence
  Synthesized
  misc_feature (36)..(36): n=C/T
gtgaccgaagtgcacccaattgatcttcaccgtcangcatccgtagttcgccgtggactgaccgagccaac

SEQ ID NO: 1461 - DNA, 71 bp, artificial sequence
  Synthesized
  misc_feature (36)..(36): n=C/T
catgtcaccttcgtggatataaaaatggattaaggnggaaagatcattaaccgcctctgataccatatgaa

SEQ ID NO: 1462 - DNA, 71 bp, artificial sequence
  Synthesized
  misc_feature (36)..(36): n=G/T
ctttacaccgaggaccctagtcatccaaataacctntaaagagtccttagcactattgctctgtgtctcta

SEQ ID NO: 1463 - DNA, 71 bp, artificial sequence
  Synthesized
  misc_feature (36)..(36): n=A/G
tggggcaaatcatgcgtaatataaagataagacacncaattaaccttataaggtaattctcctcctcctta

SEQ ID NO: 1464 - DNA, 71 bp, artificial sequence
  Synthesized
  misc_feature (36)..(36): n=G/T
cttcaagatgactccactttgtttctttcgatgaanttcgtggatagtctcatgaagaatgacaacccctt

SEQ ID NO: 1465 - DNA, 71 bp, artificial sequence
  Synthesized
  misc_feature (36)..(36): n=A/G
tgcggcctaactcagctcgtcgccatgcggtatggnaccatcccgattgtccgcaagactggaggtacgta

SEQ ID NO: 1466 - DNA, 71 bp, artificial sequence
  Synthesized
  misc_feature (36)..(36): n=A/G
tagcctagcaaaatctgttcaaatgcaaaatcgtcnagaacaagcaatcgacacaaagaaatgaataaaat

SEQ ID NO: 1467 - DNA, 71 bp, artificial sequence
  Synthesized
  misc_feature (36)..(36): n=A/G
caaacaaggctgttactaagaaaatggtgtttactncattaagggctaatttcgaaactcaaatctccttg

SEQ ID NO: 1468 - DNA, 71 bp, artificial sequence
  Synthesized
  misc_feature (36)..(36): n=C/T
aaacatccctacaaagactacaaacattgcaggcantgtccatgttgtgctgctggatcgaaaaatccaac

SEQ ID NO: 1469 - DNA, 71 bp, artificial sequence
  Synthesized
  misc_feature (36)..(36): n=C/T
taggattgggttaaaattggaaccgagtttagtgcnatggatgaatgagtgtttcacattgttatcgcgtc

SEQ ID NO: 1470 - DNA, 71 bp, artificial sequence
  Synthesized
  misc_feature (36)..(36): n=A/T
gctgccattcccgtaaccaagatttgggtatataanggaggcgtttaaacgaccagtcttaaccgcgaccg

SEQ ID NO: 1471 - DNA, 71 bp, artificial sequence
  Synthesized
  misc_feature (36)..(36): n=C/T
ttggtctatttgtgcaaataactacatgtttataangtcccgcactattgtgtattgtggtcgacaatgcc

SEQ ID NO: 1472 - DNA, 71 bp, artificial sequence
  Synthesized
  misc_feature (36)..(36): n=A/G
tgggatatcggaggagaaatttagggggaaccgctnaacacagtctaaggctgagccagctgcagcttgct

SEQ ID NO: 1473 - DNA, 71 bp, artificial sequence
  Synthesized
  misc_feature (36)..(36): n=A/G
ccacctgattcatcaaaaaatttgacgatggaacancattaagttcaaatcaccttcaaggccaccgaaag

SEQ ID NO: 1474 - DNA, 71 bp, artificial sequence
  Synthesized
  misc_feature (36)..(36): n=C/T
cgccacatcacaattcacaaacaaaaaaccatgccncccctagatcacagtatcagcagaaaatccgtcca

SEQ ID NO: 1475 - DNA, 71 bp, artificial sequence
  Synthesized
  misc_feature (36)..(36): n=A/G
agcgtgcgaaacatgccacgctctaaggaggccctnttcatcaccagagagtcttcttggttgaatccctg

SEQ ID NO: 1476 - DNA, 71 bp, artificial sequence
  Synthesized
  misc_feature (36)..(36): n=C/G
ctgccctcctgctgaaatcaacagcttatctcctangtgtggatagttatttcatgagtctctcgaatcag

SEQ ID NO: 1477 - DNA, 71 bp, artificial sequence
  Synthesized
  misc_feature (36)..(36): n=C/T
gctgagcgttgactgtatatagaatgctattttatntttaccttttctaagtacgtaattgactgacagag

SEQ ID NO: 1478 - DNA, 71 bp, artificial sequence
  Synthesized
  misc_feature (36)..(36): n=A/G
ctcttaaatgagtcgtctgtatgatgccatgtcacngaaatttgcttacgtggactataataaaaagaagg

SEQ ID NO: 1479 - DNA, 71 bp, artificial sequence
  Synthesized
  misc_feature (36)..(36): n=G/T
gctgcagcagcttgtggctggaatcttgacacaacngtaaggagctacctttttttttcagtttgatacgc

SEQ ID NO: 1480 - DNA, 71 bp, artificial sequence
  Synthesized
  misc_feature (36)..(36): n=C/T
gtgcgctgctcgagcggttcatagcgtcgagaccangtcagcaataacgcacaattacatagaatctattc

SEQ ID NO: 1481 - DNA, 71 bp, artificial sequence
  Synthesized
  misc_feature (36)..(36): n=G/T
ttcatcaatctcggccctttgatctgaaactagcgnccatgattagatctagtttacagcaaaccgttaag

SEQ ID NO: 1482 - DNA, 71 bp, artificial sequence
  Synthesized
  misc_feature (36)..(36): n=C/T
tgcacttgcccaacaatgtggtagtcaaactcgtgngcgacattgaggtggcttcctagataggataatct

SEQ ID NO: 1483 - DNA, 71 bp, artificial sequence
  Synthesized
  misc_feature (36)..(36): n=A/G
ccgagctggagaaacagtgagtcggggagacgagcngcagtgcaacccctgaggcggtgaagcagcgagac

SEQ ID NO: 1484 - DNA, 71 bp, artificial sequence
  Synthesized
  misc_feature (36)..(36): n=G/T
agcatctaatgaagatatgtttgaacatttttatgnggtgtcgtgcatcattagatactctggataaaaat

SEQ ID NO: 1485 - DNA, 71 bp, artificial sequence
  Synthesized
  misc_feature (36)..(36): n=A/G
ctaaaatttctatatagttgaacaggaaatgaaacnctatacacgatagaaatcaatcaccacccccaacc

SEQ ID NO: 1486 - DNA, 71 bp, artificial sequence
  Synthesized
  misc_feature (36)..(36): n=C/G
gcgtggattaacataattatgactatatatccaaanatgactattttcagcatagtcacggacaaattgta

SEQ ID NO: 1487 - DNA, 71 bp, artificial sequence
  Synthesized
  misc_feature (36)..(36): n=A/G
gatgtttggttgtttgttgggtaacatatgtcctcnttatagtgagtctaaacttagatgattcacatgct

SEQ ID NO: 1488 - DNA, 71 bp, artificial sequence
  Synthesized
  misc_feature (36)..(36): n=C/T
ctatatttatgaattgaaagttagaaaaatcaactnctatgagacatgtagcagtttcatagatacaaggc

SEQ ID NO: 1489 - DNA, 71 bp, artificial sequence
  Synthesized
  misc_feature (36)..(36): n=A/G
tttagtttaatcgatgtagattaatctttctagccnaagtagatttgcttataattataatctgactacat

SEQ ID NO: 1490 - DNA, 71 bp, artificial sequence
  Synthesized
  misc_feature (36)..(36): n=C/T
agctagcacagctagaggtagttgactctgctgtangtacgtacgtatgctatgatggagggcgacgactt

SEQ ID NO: 1491 - DNA, 71 bp, artificial sequence
  Synthesized
  misc_feature (36)..(36): n=C/T
agaggctgttgacgagaggccccaagaacatccacngctggcccaggttccacgcgaagaggtacaagccc

SEQ ID NO: 1492 - DNA, 71 bp, artificial sequence
  Synthesized
  misc_feature (36)..(36): n=G/T
acgagccagaagaggacgtccacgttgaggaagaanaggacgttggccaggaccagagggtgcgctgcgca

SEQ ID NO: 1493 - DNA, 71 bp, artificial sequence
  Synthesized
  misc_feature (36)..(36): n=C/T
gaggaggggcatgagagagctgaggtaaggcccacngccgctttcctagcaccagcgctggcctggcctcc

SEQ ID NO: 1494 - DNA, 71 bp, artificial sequence
  Synthesized
  misc_feature (36)..(36): n=C/T
gacgagctactatggcggatcaggtgcccggtcgcnagagttgagcacggtgttgtcatggccgggaagtc

SEQ ID NO: 1495 - DNA, 71 bp, artificial sequence
  Synthesized
  misc_feature (36)..(36): n=C/T
gaaagaaggatctattcacgaggagatgagttaaangtaaggtaccgtttggttccaaaacatagttggac

SEQ ID NO: 1496 - DNA, 71 bp, artificial sequence
  Synthesized
  misc_feature (36)..(36): n=A/G
taattttctagcacatgcaaataaaaacaaaggatncacatgtaaggaatgggcgcgtgggggtggaggcg

SEQ ID NO: 1497 - DNA, 71 bp, artificial sequence
  Synthesized
  misc_feature (36)..(36): n=C/T
agcacgatagctgacagccacacatatatctacggnacgatggccgacaatcacatcaatcggcgtccata

SEQ ID NO: 1498 - DNA, 71 bp, artificial sequence
  Synthesized
  misc_feature (36)..(36): n=C/T
tacaactggtgatcacatagtttttgcaaagcaagnctcaagtgtttctttttttcctttctcattcttgg

SEQ ID NO: 1499 - DNA, 71 bp, artificial sequence
  Synthesized
  misc_feature (36)..(36): n=A/C
gatggtgtgaggggacggatgcggttgttggatcancatacggtgctgccggagctaaggaagaagatgct

SEQ ID NO: 1500 - DNA, 71 bp, artificial sequence
  Synthesized
  misc_feature (36)..(36): n=A/G
gtgggtggttggactggtttgtcgaagggctaggcnaaccatgaaggttgtttgatgtcgccgattgattc

SEQ ID NO: 1501 - DNA, 71 bp, artificial sequence
  Synthesized
  misc_feature (36)..(36): n=A/C
attatctcacatcgagagcccaaacttgtataaatntgtgtgtctcgctttcggtcacgtgacttacccta

SEQ ID NO: 1502 - DNA, 71 bp, artificial sequence
  Synthesized
  misc_feature (36)..(36): n=C/T
gcaggacgtgtgggtgtggctcgacctcagtggaanaacaaagttttcctctgcttacctaagctaagacc

SEQ ID NO: 1503 - DNA, 71 bp, artificial sequence
  Synthesized
  misc_feature (36)..(36): n=G/T
tgatccttgcatgaatcctttgcacgcatggtgtgncgaccgctccacctcctttcctcactcgttgtttc

SEQ ID NO: 1504 - DNA, 71 bp, artificial sequence
  Synthesized
  misc_feature (36)..(36): n=C/T
tatagcattattattaggataggatatatgtcatgnaataagttaatgtacatgaactaccgtattgcagc

SEQ ID NO: 1505 - DNA, 71 bp, artificial sequence
  Synthesized
  misc_feature (36)..(36): n=A/G
ttcttgtcgatacttggtcgtttttgcagaaaacanaaaacattcatgtgtttttgtaatccaacagttta

SEQ ID NO: 1506 - DNA, 71 bp, artificial sequence
  Synthesized
  misc_feature (36)..(36): n=C/T
agtgtttactttggcaaattaacttaattttgtttnttgcactactttacaactttgtttctattaacaac

SEQ ID NO: 1507 - DNA, 71 bp, artificial sequence
  Synthesized
  misc_feature (36)..(36): n=G/T
ctgtatattgcgctttgactttgattagatttatangaaaaaaattacataaatatctgcagctgtcattc

SEQ ID NO: 1508 - DNA, 71 bp, artificial sequence
  Synthesized
  misc_feature (36)..(36): n=A/C
attttcttgaacagagatgtatgtagatcatttttnttgaacacggaggagagctgcgtattttttatatt

SEQ ID NO: 1509 - DNA, 71 bp, artificial sequence
  Synthesized
  misc_feature (36)..(36): n=A/C
tcgacgcgaagtgcctgcatgactcgatccaaaacngcaactttttttttttgtagtgttcctgtcacctc

SEQ ID NO: 1510 - DNA, 71 bp, artificial sequence
  Synthesized
  misc_feature (36)..(36): n=C/T
gaagttctctgttctctccctcgtccggtcgtcctngtccctcactccctctccctagttgcctacccccg

SEQ ID NO: 1511 - DNA, 71 bp, artificial sequence
  Synthesized
  misc_feature (36)..(36): n=A/G
gaggatgtcgaggaaggaaagacctagtccatatcnacgcgtcgacgtggatgaccggagggagagaagag

SEQ ID NO: 1512 - DNA, 71 bp, artificial sequence
  Synthesized
  misc_feature (36)..(36): n=A/G
agcccatgacttgtatcgagctaaatccttacttcnggaaaaaataactcatgagatctattgtttccgaa

SEQ ID NO: 1513 - DNA, 71 bp, artificial sequence
  Synthesized
  misc_feature (36)..(36): n=A/G
gagctggggatcggatgtgggggtcgtgtacatagncgtcaagtcgtcaacactctccagcactttgatgc

SEQ ID NO: 1514 - DNA, 71 bp, artificial sequence
  Synthesized
  misc_feature (36)..(36): n=A/G
ataaacctaacatggctagtgactaaatttcattanttgaactgagattgaaaagctctgtcgcctaaggt

SEQ ID NO: 1515 - DNA, 71 bp, artificial sequence
  Synthesized
  misc_feature (36)..(36): n=A/G
ttgtttagtgtttccatgtacactgtatttttgacntgttcacgttgggtgtgatccgatttcttgttttt

SEQ ID NO: 1516 - DNA, 71 bp, artificial sequence
  Synthesized
  misc_feature (36)..(36): n=G/T
aggaaaatcattgacattttaaactaacagcacaantaatctcctatgtttcgcatatgcctacaaaatag

SEQ ID NO: 1517 - DNA, 71 bp, artificial sequence
  Synthesized
  misc_feature (36)..(36): n=A/G
agaatagatataaaccacagcgtattgaacaccgantgttgcctgcacacccaatagtactcacttgcaaa

SEQ ID NO: 1518 - DNA, 71 bp, artificial sequence
  Synthesized
  misc_feature (36)..(36): n=C/T
gctcggctcgttcagtggcgccgatgcaaaatcacnagggccgtagggtactagcagattccgcgacaccc

SEQ ID NO: 1519 - DNA, 71 bp, artificial sequence
  Synthesized
  misc_feature (36)..(36): n=A/C
gcggcgtcatacccgtagctccaaaacttggctacntgacctgaagcatttctatcacgattgttaaacgt

SEQ ID NO: 1520 - DNA, 71 bp, artificial sequence
  Synthesized
  misc_feature (36)..(36): n=A/C
agtgatggttcagcaactccgacggcacgtgtgccngtgtatgtaaacgcgtgcgtgatagtacattttag

SEQ ID NO: 1521 - DNA, 71 bp, artificial sequence
  Synthesized
  misc_feature (36)..(36): n=A/G
tgtgtgatcgatccataggctttgctgttgctctgntccactgatctctcttcctgtggtgtcgccttttg

SEQ ID NO: 1522 - DNA, 71 bp, artificial sequence
  Synthesized
  misc_feature (36)..(36): n=A/G
aaggccttagctaatttatttttagctagctaacantcaactatagcttacgtgagctctatttaggtgca

SEQ ID NO: 1523 - DNA, 71 bp, artificial sequence
  Synthesized
  misc_feature (36)..(36): n=G/T
ggtcgtgaagaactcgggccagccacaaggtactgngatatctatttgcttttcccgcttattattttctg

SEQ ID NO: 1524 - DNA, 71 bp, artificial sequence
  Synthesized
  misc_feature (36)..(36): n=C/T
aggtgaggtgtgcgactatctctctcctcctccacnggccgaggtacttctggctgaccgactaagggtgt

SEQ ID NO: 1525 - DNA, 71 bp, artificial sequence
  Synthesized
  misc_feature (36)..(36): n=C/T
actcccaacagtaatgtcgtctctgggatcctgacngagacttttcactttgagctggcaccgaatcagta

SEQ ID NO: 1526 - DNA, 71 bp, artificial sequence
  Synthesized
  misc_feature (36)..(36): n=G/T
gggagacccatactcgcctatctgcgcctcctcctnctctgcctcttgcccttattgctcttttgcagtag

SEQ ID NO: 1527 - DNA, 71 bp, artificial sequence
  Synthesized
  misc_feature (36)..(36): n=C/T
ggacatatccttgttgtctggattgatgtcaattanaacagattcatcgacatacggggtcacacgtgcac

SEQ ID NO: 1528 - DNA, 71 bp, artificial sequence
  Synthesized
  misc_feature (36)..(36): n=A/G
acggataaaagtaatagaaaaaagcatagaattttnttacacagattcgattataggttgctggaacatga

SEQ ID NO: 1529 - DNA, 71 bp, artificial sequence
  Synthesized
  misc_feature (36)..(36): n=G/T
ccgttcacttccttttctctcaagtcgagggacatngcaccatccagcctcctaaactgtatgccatttct

SEQ ID NO: 1530 - DNA, 71 bp, artificial sequence
  Synthesized
  misc_feature (36)..(36): n=G/T
tttctagtttaatttagtatggatcaaagtgtgtancaggtctctattgattgtactaccaaataaattaa

SEQ ID NO: 1531 - DNA, 71 bp, artificial sequence
  Synthesized
  misc_feature (36)..(36): n=G/T
ggtctactagaggatcggttcgtgttcatggcatgngtattaatgtaaacgttatcggtaaccgccagaat

SEQ ID NO: 1532 - DNA, 71 bp, artificial sequence
  Synthesized
  misc_feature (36)..(36): n=A/G
taagtgatatatcatgaggcgaaacaaagtaatctntgtttccaaaagatttctctgacaaaaaattctag

SEQ ID NO: 1533 - DNA, 71 bp, artificial sequence
  Synthesized
  misc_feature (36)..(36): n=C/T
gcattctgtcgacccaggcacacgggtccaaaatcngagaggctagtgggtccagctagctacagctgctg

SEQ ID NO: 1534 - DNA, 71 bp, artificial sequence
  Synthesized
  misc_feature (36)..(36): n=C/T
ctggttgtgatatttttcatggcttgtgaattgctngggaagagttatgtgaaacttattagagtacggat

SEQ ID NO: 1535 - DNA, 71 bp, artificial sequence
  Synthesized
  misc_feature (36)..(36): n=C/T
aagtagtgcaacagataacgccgttgcatttcctcnagattccttacctgtggccgtcagcaagtgtccgt

SEQ ID NO: 1536 - DNA, 71 bp, artificial sequence
  Synthesized
  misc_feature (36)..(36): n=A/G
ccatacaaaataagcatatatatagttatagtcggngagtttatagattccacaatgccatgccttgggac

What is claimed is:

1. A genome-wide maize single nucleotide polymorphism (SNP) marker, comprising 1,536 SNP markers shown in Table 1, wherein the SNP markers refer to sequences corresponding to the “sequence” column in Table 1, wherein a nucleotide in square brackets ([ ]) of each sequence represents an SNP locus.

2. A probe for detecting the SNP marker according to claim 1.

3. Use of the probe according to claim 2 in the preparation of a genome-wide maize SNP array.

4. A genome-wide maize SNP array, comprising the probe according to claim 2.

5. Use of the SNP marker according to claim 1 or the probe according to claim 2 or the SNP array according to claim 4 in the construction of a maize DNA fingerprint database.

6. Use of the SNP marker according to claim 1 or the probe according to claim 2 or the SNP array according to claim 4 in the identification of genuineness of maize cultivars or the identification of maize cultivars.

7. Use of the SNP marker according to claim 1 or the probe according to claim 2 or the SNP array according to claim 4 in maize cluster analysis or maize phylogenetic analysis.

8. Use of the SNP marker according to claim 1 or the probe according to claim 2 or the SNP array according to claim 4 in the analysis of maize germplasm resources.

9. Use of the SNP marker according to claim 1 or the probe according to claim 2 or the SNP array according to claim 4 in the construction of a maize linkage map and gene mapping.

10. Use of the SNP marker according to claim 1 or the probe according to claim 2 or the SNP array according to claim 4 in the background selection of molecular breeding materials of maize.
